(19) United States
(12) Patent Application Publication
(10) Pub. No.: US 2022/0332816 A1
(43) Pub. Date: Oct. 20, 2022

(54) ANTI-TIGIT ANTIBODIES

(71) Applicant: Single Cell Technology, Inc., San Jose, CA (US)

(72) Inventors: Leyan TANG, San Jose, CA (US); Allison SCHULKINS, San Jose, CA (US); Kimberly THAN, San Jose, CA (US); Chun-Nan CHEN, San Jose, CA (US)

(73) Assignee: Single Cell Technology, Inc., San Jose, CA (US)

(21) Appl. No.: 17/621,597

(22) PCT Filed: Jun. 22, 2020
(86) PCT No.: PCT/US2020/038925

§ 371 Date: Dec. 21, 2021

Related U.S. Application Data
(60) Provisional application No. 62/864,842, filed on Jun. 21, 2019.

(51) Int. Cl. C07K 16/28

(52) U.S. Cl. CPC C07K 16/2803; C07K 2317/565; C07K 2317/21; C07K 2317/24; C07K 2317/92

(57) ABSTRACT

Provided are antibodies that specifically recognize T cell immunoreceptor with Ig and ITIM domains protein (TIGIT).

### CROSS-REFERENCE TO RELATED APPLICATIONS

[0001] This application claims priority to U.S. Provisional Application No. 62/864,842 filed 21 Jun. 2019, which is incorporated herein by reference in its entirety for all purposes.

### INCORPORATION OF SEQUENCE LISTING

[0002] The instant application contains a Sequence Listing which has been submitted via EFS-Web and is hereby incorporated by reference in its entirety. The ASCII copy, created on Jun. 22, 2020, is named SCT0010-401-PC_Sequence_Listing_ST25.txt, and is 849,000 bytes in size.

### BACKGROUND

[0003] TIGIT (T cell immunoreceptor with Ig and ITIM domains) is an immune receptor present on some T cells and natural killer cells (Yu et al., 2009) and is a co-inhibitory receptor protein also known as WUCAM (Boles et al., 2009) or Vstm3 (Levin et al., 2011). TIGIT was discovered in genomic searches for proteins specifically expressed on T cells, and has an immunoglobulin variable domain, a transmembrane domain, and an immunoreceptor tyrosine-based inhibitory motif (ITIM) and contains signature sequence elements of the PVR protein family. It is known to interact with poliovirus receptor (PVR; CD155) and with nectin2 (CD112) (Stengel et al., 2012). Although PVR may interact with the co-activating receptor DNAM-1 (CD226) to enhance tumor killing, the high affinity TIGIT/PVR interaction would inhibit such killing and may act to prevent killing of normal (self) cells that also express PVR (Stanietsky et al., 2009). The dominance of this inhibitory interaction may be important in suppression of anti-self-immune reactions, but in the tumor context it suppresses tumor eradication.

[0004] TIGIT suppresses T cell activation by promoting the generation of mature immunoregulatory dendritic cells (Yu et al., 2009). TIGIT and other such co-inhibitory molecules (e.g. CTLA-4, PD-1, Lag3 and BTLA) may play a role in evasion of immunosurveillance by tumor cells. Experiments have shown that PVR/CD155 is over-expressed on melanoma cells (Gao et al., 2017) and various other tumors. It is possible that the TIGIT/PVR interaction can shield such tumor cells from immune-mediated eradication by inhibiting anti-tumor responses of T and NK cells (Stanietsky et al., 2009; Lozano et al., 2012). Other experiments have identified a TIGIT subset of regulatory T cells (T_{regs}) that selectively suppress Th1 and Th17 responses (Joller et al., 2014), suggesting an alternative mechanism by which an anti-TIGIT antibody may enhance anti-tumor immune response.

[0005] TIGIT may act to “turn off” the immune response similarly to other co-inhibitory receptors such as CTLA-4, PD-1 and BTLA. Id. Antibodies targeting CTLA-4 (ipilimumab) and PD-1 (nivolumab, pembrolizumab) have been approved for the treatment of human cancers, validating this therapeutic approach. Antibodies that bind to human TIGIT might also find use in treatment of cancers (Johnston et al., 2014). In mouse models, antibody blockade of both PD-L1 and TIGIT leads to a synergistic enhancement of CD8⁺ T cell mediated tumor rejection (Johnston et al., 2015). Similar results have been obtained in animal models of melanoma. (Gao et al., 2017). Some experiments suggest that TIGIT blockade is effective to enhance anti-tumor CD8⁺ T cell response only in the presence of the co-activating receptor DNAM-1/CD226, which competes with TIGIT for binding to PVR/CD155 (Johnston et al., 2014).

[0006] Recent experiments have demonstrated that intratumoral bacteria expressing Fap2 protein may inhibit NK cell mediated tumor killing by binding to TIGIT (Gur et al., 2015), suggesting that eliminating such bacteria, blocking the interaction of TIGIT with Fap2, or blocking the activity of TIGIT generally, may be useful in treatment of cancer, e.g. colorectal cancer (Hampton, 2015).

[0007] Thus, the need exists for improved methods of treating cancer and chronic viral infections and medicaments, such as therapeutic monoclonal antibodies. Medicines for use in such improved methods of treatment may comprise antibodies or antibody fragments that specifically bind to TIGIT and reverse or partially reverse the TIGIT-mediated suppression of anti-tumor or anti-viral immune responses.

### SUMMARY

[0008] Provided are antibodies that recognize and specifically bind to human TIGIT. In one embodiment, the disclosure provides an antibody that binds to SEQ ID NO:1.

### BRIEF DESCRIPTION OF THE SEQUENCES

TABLE 1

| SEQ ID NO. | Description of sequence |
|---|---|
| 1 | Human TIGIT protein sequence |
| 2 | Human TIGIT His tagged protein sequence |
| 3 | Human TIGIT Human Fc tagged protein sequence |
| 4 | SCT-Ga001 mature heavy chain variable domain protein sequence |
| 5 | SCT-Ga002 mature heavy chain variable domain protein sequence |
| 6 | SCT-Ga003 mature heavy chain variable domain protein sequence |
| 6 | SCT-Ga042 mature heavy chain variable domain protein sequence |
| 7 | SCT-Ga004 mature heavy chain variable domain protein sequence |
| 7 | SCT-Ga068 mature heavy chain variable domain protein sequence |
| 7 | SCT-Ga073 mature heavy chain variable domain protein sequence |
| 7 | SCT-Ga118 mature heavy chain variable domain protein sequence |
| 7 | SCT-Ga125 mature heavy chain variable domain protein sequence |
| 7 | SCT-Ga157 mature heavy chain variable domain protein sequence |
| 7 | SCT-Ga158 mature heavy chain variable domain protein sequence |
| 8 | SCT-Ga005 mature heavy chain variable domain protein sequence |
| 9 | SCT-Ga006 mature heavy chain variable domain protein sequence |
| 10 | SCT-Ga007 mature heavy chain variable domain protein sequence |
| 11 | SCT-Ga008 mature heavy chain variable domain protein sequence |
| 12 | SCT-Ga009 mature heavy chain variable domain protein sequence |
| 13 | SCT-Ga010 mature heavy chain variable domain protein sequence |
| 14 | SCT-Ga011 mature heavy chain variable domain protein sequence |
| 15 | SCT-Ga012 mature heavy chain variable domain protein sequence |
| 16 | SCT-Ga013 mature heavy chain variable domain protein sequence |
| 17 | SCT-Ga014 mature heavy chain variable domain protein sequence |
| 17 | SCT-Ga140 mature heavy chain variable domain protein sequence |
| 17 | SCT-Ga152 mature heavy chain variable domain protein sequence |
| 18 | SCT-Ga015 mature heavy chain variable domain protein sequence |
| 19 | SCT-Ga016 mature heavy chain variable domain protein sequence |
| 20 | SCT-Ga017 mature heavy chain variable domain protein sequence |
| 20 | SCT-Ga022 mature heavy chain variable domain protein sequence |
| 20 | SCT-Ga045 mature heavy chain variable domain protein sequence |
| 20 | SCT-Ga066 mature heavy chain variable domain protein sequence |
| 21 | SCT-Ga018 mature heavy chain variable domain protein sequence |
| 21 | SCT-Ga050 mature heavy chain variable domain protein sequence |
| 22 | SCT-Ga019 mature heavy chain variable domain protein sequence |
| 23 | SCT-Ga020 mature heavy chain variable domain protein sequence |
| 23 | SCT-Ga044 mature heavy chain variable domain protein sequence |
| 23 | SCT-Ga141 mature heavy chain variable domain protein sequence |
| 24 | SCT-Ga021 mature heavy chain variable domain protein sequence |
| 25 | SCT-Ga023 mature heavy chain variable domain protein sequence |
| 26 | SCT-Ga024 mature heavy chain variable domain protein sequence |
| 27 | SCT-Ga025 mature heavy chain variable domain protein sequence |
| 27 | SCT-Ga043 mature heavy chain variable domain protein sequence |
| 27 | SCT-Ga121 mature heavy chain variable domain protein sequence |
| 27 | SCT-Ga133 mature heavy chain variable domain protein sequence |
| 27 | SCT-Ga154 mature heavy chain variable domain protein sequence |
| 28 | SCT-Ga026 mature heavy chain variable domain protein sequence |
| 29 | SCT-Ga027 mature heavy chain variable domain protein sequence |
| 30 | SCT-Ga028 mature heavy chain variable domain protein sequence |
| 31 | SCT-Ga029 mature heavy chain variable domain protein sequence |
| 32 | SCT-Ga030 mature heavy chain variable domain protein sequence |
| 33 | SCT-Ga031 mature heavy chain variable domain protein sequence |
| 33 | SCT-Ga062 mature heavy chain variable domain protein sequence |
| 34 | SCT-Ga032 mature heavy chain variable domain protein sequence |
| 35 | SCT-Ga033 mature heavy chain variable domain protein sequence |
| 36 | SCT-Ga034 mature heavy chain variable domain protein sequence |
| 36 | SCT-Ga083 mature heavy chain variable domain protein sequence |
| 37 | SCT-Ga035 mature heavy chain variable domain protein sequence |
| 38 | SCT-Ga036 mature heavy chain variable domain protein sequence |
| 39 | SCT-Ga037 mature heavy chain variable domain protein sequence |
| 40 | SCT-Ga038 mature heavy chain variable domain protein sequence |
| 41 | SCT-Ga039 mature heavy chain variable domain protein sequence |
| 42 | SCT-Ga040 mature heavy chain variable domain protein sequence |
| 43 | SCT-Ga041 mature heavy chain variable domain protein sequence |
| 44 | SCT-Ga046 mature heavy chain variable domain protein sequence |
| 45 | SCT-Ga047 mature heavy chain variable domain protein sequence |
| 46 | SCT-Ga048 mature heavy chain variable domain protein sequence |
| 47 | SCT-Ga049 mature heavy chain variable domain protein sequence |
| 48 | SCT-Ga051 mature heavy chain variable domain protein sequence |
| 49 | SCT-Ga052 mature heavy chain variable domain protein sequence |
| 50 | SCT-Ga053 mature heavy chain variable domain protein sequence |
| 51 | SCT-Ga054 mature heavy chain variable domain protein sequence |
| 51 | SCT-Ga168 mature heavy chain variable domain protein sequence |
| 51 | SCT-Ga169 mature heavy chain variable domain protein sequence |
| 52 | SCT-Ga055 mature heavy chain variable domain protein sequence |
| 53 | SCT-Ga056 mature heavy chain variable domain protein sequence |
| 54 | SCT-Ga057 mature heavy chain variable domain protein sequence |
| 55 | SCT-Ga058 mature heavy chain variable domain protein sequence |
| 55 | SCT-Ga077 mature heavy chain variable domain protein sequence |
| 56 | SCT-Ga059 mature heavy chain variable domain protein sequence |
| 57 | SCT-Ga060 mature heavy chain variable domain protein sequence |
| 58 | SCT-Ga061 mature heavy chain variable domain protein sequence |
| 58 | SCT-Ga150 mature heavy chain variable domain protein sequence |
| 59 | SCT-Ga063 mature heavy chain variable domain protein sequence |
| 60 | SCT-Ga064 mature heavy chain variable domain protein sequence |
| 61 | SCT-Ga065 mature heavy chain variable domain protein sequence |
| 62 | SCT-Ga067 mature heavy chain variable domain protein sequence |
| 62 | SCT-Ga069 mature heavy chain variable domain protein sequence |
| 62 | SCT-Ga071 mature heavy chain variable domain protein sequence |
| 62 | SCT-Ga080 mature heavy chain variable domain protein sequence |
| 62 | SCT-Ga110 mature heavy chain variable domain protein sequence |
| 63 | SCT-Ga070 mature heavy chain variable domain protein sequence |
| 64 | SCT-Ga072 mature heavy chain variable domain protein sequence |
| 65 | SCT-Ga074 mature heavy chain variable domain protein sequence |
| 66 | SCT-Ga075 mature heavy chain variable domain protein sequence |
| 67 | SCT-Ga076 mature heavy chain variable domain protein sequence |
| 67 | SCT-Ga094 mature heavy chain variable domain protein sequence |
| 67 | SCT-Ga166 mature heavy chain variable domain protein sequence |
| 68 | SCT-Ga078 mature heavy chain variable domain protein sequence |
| 69 | SCT-Ga079 mature heavy chain variable domain protein sequence |
| 70 | SCT-Ga081 mature heavy chain variable domain protein sequence |
| 71 | SCT-Ga082 mature heavy chain variable domain protein sequence |
| 72 | SCT-Ga084 mature heavy chain variable domain protein sequence |
| 73 | SCT-Ga085 mature heavy chain variable domain protein sequence |
| 74 | SCT-Ga086 mature heavy chain variable domain protein sequence |
| 75 | SCT-Ga087 mature heavy chain variable domain protein sequence |
| 75 | SCT-Ga088 mature heavy chain variable domain protein sequence |
| 76 | SCT-Ga089 mature heavy chain variable domain protein sequence |
| 77 | SCT-Ga090 mature heavy chain variable domain protein sequence |
| 78 | SCT-Ga091 mature heavy chain variable domain protein sequence |
| 79 | SCT-Ga092 mature heavy chain variable domain protein sequence |
| 79 | SCT-Ga100 mature heavy chain variable domain protein sequence |
| 80 | SCT-Ga093 mature heavy chain variable domain protein sequence |
| 81 | SCT-Ga095 mature heavy chain variable domain protein sequence |
| 82 | SCT-Ga096 mature heavy chain variable domain protein sequence |
| 83 | SCT-Ga097 mature heavy chain variable domain protein sequence |
| 84 | SCT-Ga098 mature heavy chain variable domain protein sequence |
| 84 | SCT-Ga113 mature heavy chain variable domain protein sequence |
| 84 | SCT-Ga123 mature heavy chain variable domain protein sequence |
| 84 | SCT-Ga146 mature heavy chain variable domain protein sequence |
| 84 | SCT-Ga162 mature heavy chain variable domain protein sequence |
| 85 | SCT-Ga099 mature heavy chain variable domain protein sequence |
| 86 | SCT-Ga101 mature heavy chain variable domain protein sequence |
| 87 | SCT-Ga102 mature heavy chain variable domain protein sequence |
| 88 | SCT-Ga103 mature heavy chain variable domain protein sequence |
| 89 | SCT-Ga104 mature heavy chain variable domain protein sequence |
| 90 | SCT-Ga105 mature heavy chain variable domain protein sequence |
| 91 | SCT-Ga106 mature heavy chain variable domain protein sequence |
| 92 | SCT-Ga107 mature heavy chain variable domain protein sequence |
| 93 | SCT-Ga108 mature heavy chain variable domain protein sequence |
| 93 | SCT-Ga149 mature heavy chain variable domain protein sequence |
| 94 | SCT-Ga109 mature heavy chain variable domain protein sequence |
| 95 | SCT-Ga111 mature heavy chain variable domain protein sequence |
| 96 | SCT-Ga112 mature heavy chain variable domain protein sequence |
| 97 | SCT-Ga114 mature heavy chain variable domain protein sequence |
| 98 | SCT-Ga115 mature heavy chain variable domain protein sequence |
| 99 | SCT-Ga116 mature heavy chain variable domain protein sequence |
| 100 | SCT-Ga117 mature heavy chain variable domain protein sequence |
| 101 | SCT-Ga119 mature heavy chain variable domain protein sequence |
| 102 | SCT-Ga120 mature heavy chain variable domain protein sequence |
| 102 | SCT-Ga171 mature heavy chain variable domain protein sequence |
| 103 | SCT-Ga122 mature heavy chain variable domain protein sequence |
| 104 | SCT-Ga124 mature heavy chain variable domain protein sequence |
| 105 | SCT-Ga126 mature heavy chain variable domain protein sequence |
| 106 | SCT-Ga127 mature heavy chain variable domain protein sequence |
| 107 | SCT-Ga128 mature heavy chain variable domain protein sequence |
| 108 | SCT-Ga129 mature heavy chain variable domain protein sequence |
| 109 | SCT-Ga130 mature heavy chain variable domain protein sequence |
| 110 | SCT-Ga131 mature heavy chain variable domain protein sequence |
| 111 | SCT-Ga132 mature heavy chain variable domain protein sequence |
| 112 | SCT-Ga134 mature heavy chain variable domain protein sequence |
| 113 | SCT-Ga135 mature heavy chain variable domain protein sequence |
| 114 | SCT-Ga136 mature heavy chain variable domain protein sequence |
| 115 | SCT-Ga137 mature heavy chain variable domain protein sequence |
| 116 | SCT-Ga138 mature heavy chain variable domain protein sequence |
| 117 | SCT-Ga139 mature heavy chain variable domain protein sequence |
| 118 | SCT-Ga142 mature heavy chain variable domain protein sequence |
| 119 | SCT-Ga143 mature heavy chain variable domain protein sequence |
| 120 | SCT-Ga144 mature heavy chain variable domain protein sequence |
| 121 | SCT-Ga145 mature heavy chain variable domain protein sequence |
| 122 | SCT-Ga147 mature heavy chain variable domain protein sequence |
| 123 | SCT-Ga148 mature heavy chain variable domain protein sequence |
| 124 | SCT-Ga151 mature heavy chain variable domain protein sequence |
| 125 | SCT-Ga153 mature heavy chain variable domain protein sequence |
| 126 | SCT-Ga155 mature heavy chain variable domain protein sequence |
| 127 | SCT-Ga156 mature heavy chain variable domain protein sequence |
| 128 | SCT-Ga159 mature heavy chain variable domain protein sequence |
| 129 | SCT-Ga160 mature heavy chain variable domain protein sequence |
| 130 | SCT-Ga161 mature heavy chain variable domain protein sequence |
| 131 | SCT-Ga163 mature heavy chain variable domain protein sequence |
| 132 | SCT-Ga164 mature heavy chain variable domain protein sequence |
| 133 | SCT-Ga165 mature heavy chain variable domain protein sequence |
| 134 | SCT-Ga167 mature heavy chain variable domain protein sequence |
| 135 | SCT-Ga170 mature heavy chain variable domain protein sequence |
| 136 | SCT-Ga172 mature heavy chain variable domain protein sequence |
| 137 | SCT-Ga173 mature heavy chain variable domain protein sequence |
| 138 | SCT-Ga174 mature heavy chain variable domain protein sequence |
| 139 | SCT-Ga175 mature heavy chain variable domain protein sequence |
| 140 | SCT-Ga176 mature heavy chain variable domain protein sequence |
| 140 | SCT-Ga233 mature heavy chain variable domain protein sequence |
| 141 | SCT-Ga177 mature heavy chain variable domain protein sequence |
| 142 | SCT-Ga178 mature heavy chain variable domain protein sequence |
| 143 | SCT-Ga179 mature heavy chain variable domain protein sequence |
| 144 | SCT-Ga180 mature heavy chain variable domain protein sequence |
| 145 | SCT-Ga181 mature heavy chain variable domain protein sequence |
| 146 | SCT-Ga182 mature heavy chain variable domain protein sequence |
| 147 | SCT-Ga183 mature heavy chain variable domain protein sequence |
| 148 | SCT-Ga184 mature heavy chain variable domain protein sequence |
| 149 | SCT-Ga185 mature heavy chain variable domain protein sequence |
| 150 | SCT-Ga186 mature heavy chain variable domain protein sequence |
| 151 | SCT-Ga187 mature heavy chain variable domain protein sequence |
| 151 | SCT-Ga273 mature heavy chain variable domain protein sequence |
| 152 | SCT-Ga188 mature heavy chain variable domain protein sequence |
| 153 | SCT-Ga189 mature heavy chain variable domain protein sequence |
| 154 | SCT-Ga190 mature heavy chain variable domain protein sequence |
| 155 | SCT-Ga191 mature heavy chain variable domain protein sequence |
| 156 | SCT-Ga192 mature heavy chain variable domain protein sequence |
| 157 | SCT-Ga193 mature heavy chain variable domain protein sequence |
| 158 | SCT-Ga194 mature heavy chain variable domain protein sequence |
| 159 | SCT-Ga195 mature heavy chain variable domain protein sequence |
| 160 | SCT-Ga196 mature heavy chain variable domain protein sequence |
| 161 | SCT-Ga197 mature heavy chain variable domain protein sequence |
| 162 | SCT-Ga198 mature heavy chain variable domain protein sequence |
| 163 | SCT-Ga199 mature heavy chain variable domain protein sequence |
| 163 | SCT-Ga279 mature heavy chain variable domain protein sequence |
| 164 | SCT-Ga200 mature heavy chain variable domain protein sequence |
| 164 | SCT-Ga285 mature heavy chain variable domain protein sequence |
| 165 | SCT-Ga201 mature heavy chain variable domain protein sequence |
| 166 | SCT-Ga202 mature heavy chain variable domain protein sequence |
| 167 | SCT-Ga203 mature heavy chain variable domain protein sequence |
| 168 | SCT-Ga204 mature heavy chain variable domain protein sequence |
| 169 | SCT-Ga205 mature heavy chain variable domain protein sequence |
| 170 | SCT-Ga206 mature heavy chain variable domain protein sequence |
| 170 | SCT-Ga239 mature heavy chain variable domain protein sequence |
| 171 | SCT-Ga207 mature heavy chain variable domain protein sequence |
| 171 | SCT-Ga236 mature heavy chain variable domain protein sequence |
| 171 | SCT-Ga253 mature heavy chain variable domain protein sequence |
| 172 | SCT-Ga208 mature heavy chain variable domain protein sequence |
| 173 | SCT-Ga209 mature heavy chain variable domain protein sequence |
| 173 | SCT-Ga306 mature heavy chain variable domain protein sequence |
| 173 | SCT-Ga367 mature heavy chain variable domain protein sequence |
| 174 | SCT-Ga210 mature heavy chain variable domain protein sequence |
| 175 | SCT-Ga211 mature heavy chain variable domain protein sequence |
| 176 | SCT-Ga212 mature heavy chain variable domain protein sequence |
| 176 | SCT-Ga373 mature heavy chain variable domain protein sequence |
| 177 | SCT-Ga213 mature heavy chain variable domain protein sequence |
| 177 | SCT-Ga232 mature heavy chain variable domain protein sequence |
| 177 | SCT-Ga335 mature heavy chain variable domain protein sequence |
| 177 | SCT-Ga358 mature heavy chain variable domain protein sequence |
| 177 | SCT-Ga363 mature heavy chain variable domain protein sequence |
| 178 | SCT-Ga214 mature heavy chain variable domain protein sequence |
| 179 | SCT-Ga215 mature heavy chain variable domain protein sequence |
| 180 | SCT-Ga216 mature heavy chain variable domain protein sequence |
| 180 | SCT-Ga353 mature heavy chain variable domain protein sequence |
| 181 | SCT-Ga217 mature heavy chain variable domain protein sequence |
| 181 | SCT-Ga223 mature heavy chain variable domain protein sequence |
| 182 | SCT-Ga218 mature heavy chain variable domain protein sequence |
| 182 | SCT-Ga257 mature heavy chain variable domain protein sequence |
| 182 | SCT-Ga296 mature heavy chain variable domain protein sequence |
| 183 | SCT-Ga219 mature heavy chain variable domain protein sequence |
| 183 | SCT-Ga266 mature heavy chain variable domain protein sequence |
| 183 | SCT-Ga336 mature heavy chain variable domain protein sequence |
| 184 | SCT-Ga220 mature heavy chain variable domain protein sequence |
| 185 | SCT-Ga221 mature heavy chain variable domain protein sequence |
| 186 | SCT-Ga222 mature heavy chain variable domain protein sequence |
| 187 | SCT-Ga224 mature heavy chain variable domain protein sequence |
| 188 | SCT-Ga225 mature heavy chain variable domain protein sequence |
| 189 | SCT-Ga226 mature heavy chain variable domain protein sequence |
| 189 | SCT-Ga312 mature heavy chain variable domain protein sequence |
| 189 | SCT-Ga324 mature heavy chain variable domain protein sequence |
| 190 | SCT-Ga227 mature heavy chain variable domain protein sequence |
| 191 | SCT-Ga228 mature heavy chain variable domain protein sequence |
| 192 | SCT-Ga229 mature heavy chain variable domain protein sequence |
| 192 | SCT-Ga288 mature heavy chain variable domain protein sequence |
| 193 | SCT-Ga230 mature heavy chain variable domain protein sequence |
| 194 | SCT-Ga231 mature heavy chain variable domain protein sequence |
| 195 | SCT-Ga234 mature heavy chain variable domain protein sequence |
| 196 | SCT-Ga235 mature heavy chain variable domain protein sequence |
| 197 | SCT-Ga237 mature heavy chain variable domain protein sequence |
| 198 | SCT-Ga238 mature heavy chain variable domain protein sequence |
| 198 | SCT-Ga305 mature heavy chain variable domain protein sequence |
| 199 | SCT-Ga240 mature heavy chain variable domain protein sequence |
| 200 | SCT-Ga241 mature heavy chain variable domain protein sequence |
| 201 | SCT-Ga242 mature heavy chain variable domain protein sequence |
| 201 | SCT-Ga259 mature heavy chain variable domain protein sequence |
| 201 | SCT-Ga276 mature heavy chain variable domain protein sequence |
| 201 | SCT-Ga287 mature heavy chain variable domain protein sequence |
| 201 | SCT-Ga329 mature heavy chain variable domain protein sequence |
| 201 | SCT-Ga332 mature heavy chain variable domain protein sequence |
| 202 | SCT-Ga243 mature heavy chain variable domain protein sequence |
| 203 | SCT-Ga244 mature heavy chain variable domain protein sequence |
| 204 | SCT-Ga245 mature heavy chain variable domain protein sequence |
| 205 | SCT-Ga246 mature heavy chain variable domain protein sequence |
| 206 | SCT-Ga247 mature heavy chain variable domain protein sequence |
| 207 | SCT-Ga248 mature heavy chain variable domain protein sequence |
| 208 | SCT-Ga249 mature heavy chain variable domain protein sequence |
| 209 | SCT-Ga250 mature heavy chain variable domain protein sequence |
| 210 | SCT-Ga251 mature heavy chain variable domain protein sequence |
| 210 | SCT-Ga290 mature heavy chain variable domain protein sequence |
| 211 | SCT-Ga252 mature heavy chain variable domain protein sequence |
| 212 | SCT-Ga254 mature heavy chain variable domain protein sequence |
| 213 | SCT-Ga255 mature heavy chain variable domain protein sequence |
| 214 | SCT-Ga256 mature heavy chain variable domain protein sequence |
| 215 | SCT-Ga258 mature heavy chain variable domain protein sequence |
| 216 | SCT-Ga260 mature heavy chain variable domain protein sequence |
| 217 | SCT-Ga261 mature heavy chain variable domain protein sequence |
| 218 | SCT-Ga262 mature heavy chain variable domain protein sequence |
| 219 | SCT-Ga263 mature heavy chain variable domain protein sequence |
| 220 | SCT-Ga264 mature heavy chain variable domain protein sequence |
| 220 | SCT-Ga322 mature heavy chain variable domain protein sequence |
| 221 | SCT-Ga265 mature heavy chain variable domain protein sequence |
| 222 | SCT-Ga267 mature heavy chain variable domain protein sequence |
| 223 | SCT-Ga268 mature heavy chain variable domain protein sequence |
| 224 | SCT-Ga269 mature heavy chain variable domain protein sequence |
| 224 | SCT-Ga351 mature heavy chain variable domain protein sequence |
| 225 | SCT-Ga270 mature heavy chain variable domain protein sequence |
| 226 | SCT-Ga271 mature heavy chain variable domain protein sequence |
| 227 | SCT-Ga272 mature heavy chain variable domain protein sequence |
| 228 | SCT-Ga274 mature heavy chain variable domain protein sequence |
| 229 | SCT-Ga275 mature heavy chain variable domain protein sequence |
| 230 | SCT-Ga277 mature heavy chain variable domain protein sequence |
| 230 | SCT-Ga300 mature heavy chain variable domain protein sequence |
| 231 | SCT-Ga278 mature heavy chain variable domain protein sequence |
| 232 | SCT-Ga280 mature heavy chain variable domain protein sequence |
| 233 | SCT-Ga281 mature heavy chain variable domain protein sequence |
| 234 | SCT-Ga282 mature heavy chain variable domain protein sequence |
| 235 | SCT-Ga283 mature heavy chain variable domain protein sequence |
| 236 | SCT-Ga284 mature heavy chain variable domain protein sequence |
| 237 | SCT-Ga286 mature heavy chain variable domain protein sequence |
| 238 | SCT-Ga289 mature heavy chain variable domain protein sequence |
| 238 | SCT-Ga357 mature heavy chain variable domain protein sequence |
| 239 | SCT-Ga291 mature heavy chain variable domain protein sequence |
| 240 | SCT-Ga292 mature heavy chain variable domain protein sequence |
| 241 | SCT-Ga293 mature heavy chain variable domain protein sequence |
| 242 | SCT-Ga294 mature heavy chain variable domain protein sequence |
| 243 | SCT-Ga295 mature heavy chain variable domain protein sequence |
| 244 | SCT-Ga297 mature heavy chain variable domain protein sequence |
| 245 | SCT-Ga298 mature heavy chain variable domain protein sequence |
| 246 | SCT-Ga299 mature heavy chain variable domain protein sequence |
| 246 | SCT-Ga302 mature heavy chain variable domain protein sequence |
| 247 | SCT-Ga301 mature heavy chain variable domain protein sequence |
| 248 | SCT-Ga303 mature heavy chain variable domain protein sequence |
| 249 | SCT-Ga304 mature heavy chain variable domain protein sequence |
| 250 | SCT-Ga307 mature heavy chain variable domain protein sequence |
| 251 | SCT-Ga308 mature heavy chain variable domain protein sequence |
| 252 | SCT-Ga309 mature heavy chain variable domain protein sequence |
| 253 | SCT-Ga310 mature heavy chain variable domain protein sequence |
| 254 | SCT-Ga311 mature heavy chain variable domain protein sequence |
| 255 | SCT-Ga313 mature heavy chain variable domain protein sequence |
| 256 | SCT-Ga314 mature heavy chain variable domain protein sequence |
| 257 | SCT-Ga315 mature heavy chain variable domain protein sequence |
| 257 | SCT-Ga331 mature heavy chain variable domain protein sequence |
| 258 | SCT-Ga316 mature heavy chain variable domain protein sequence |
| 259 | SCT-Ga317 mature heavy chain variable domain protein sequence |
| 260 | SCT-Ga318 mature heavy chain variable domain protein sequence |
| 261 | SCT-Ga319 mature heavy chain variable domain protein sequence |
| 262 | SCT-Ga320 mature heavy chain variable domain protein sequence |
| 263 | SCT-Ga321 mature heavy chain variable domain protein sequence |
| 264 | SCT-Ga323 mature heavy chain variable domain protein sequence |
| 265 | SCT-Ga325 mature heavy chain variable domain protein sequence |
| 266 | SCT-Ga326 mature heavy chain variable domain protein sequence |
| 267 | SCT-Ga327 mature heavy chain variable domain protein sequence |
| 267 | SCT-Ga375 mature heavy chain variable domain protein sequence |
| 268 | SCT-Ga328 mature heavy chain variable domain protein sequence |
| 269 | SCT-Ga330 mature heavy chain variable domain protein sequence |
| 270 | SCT-Ga333 mature heavy chain variable domain protein sequence |
| 271 | SCT-Ga334 mature heavy chain variable domain protein sequence |
| 272 | SCT-Ga337 mature heavy chain variable domain protein sequence |
| 273 | SCT-Ga338 mature heavy chain variable domain protein sequence |
| 274 | SCT-Ga339 mature heavy chain variable domain protein sequence |
| 275 | SCT-Ga340 mature heavy chain variable domain protein sequence |
| 276 | SCT-Ga341 mature heavy chain variable domain protein sequence |
| 277 | SCT-Ga342 mature heavy chain variable domain protein sequence |
| 278 | SCT-Ga343 mature heavy chain variable domain protein sequence |
| 279 | SCT-Ga344 mature heavy chain variable domain protein sequence |
| 280 | SCT-Ga345 mature heavy chain variable domain protein sequence |
| 281 | SCT-Ga346 mature heavy chain variable domain protein sequence |
| 282 | SCT-Ga347 mature heavy chain variable domain protein sequence |
| 283 | SCT-Ga348 mature heavy chain variable domain protein sequence |
| 284 | SCT-Ga349 mature heavy chain variable domain protein sequence |
| 285 | SCT-Ga350 mature heavy chain variable domain protein sequence |
| 286 | SCT-Ga352 mature heavy chain variable domain protein sequence |
| 287 | SCT-Ga354 mature heavy chain variable domain protein sequence |
| 288 | SCT-Ga355 mature heavy chain variable domain protein sequence |
| 289 | SCT-Ga356 mature heavy chain variable domain protein sequence |
| 290 | SCT-Ga359 mature heavy chain variable domain protein sequence |
| 291 | SCT-Ga360 mature heavy chain variable domain protein sequence |
| 292 | SCT-Ga361 mature heavy chain variable domain protein sequence |
| 293 | SCT-Ga362 mature heavy chain variable domain protein sequence |
| 294 | SCT-Ga364 mature heavy chain variable domain protein sequence |
| 295 | SCT-Ga365 mature heavy chain variable domain protein sequence |
| 296 | SCT-Ga366 mature heavy chain variable domain protein sequence |
| 297 | SCT-Ga368 mature heavy chain variable domain protein sequence |
| 298 | SCT-Ga369 mature heavy chain variable domain protein sequence |
| 299 | SCT-Ga370 mature heavy chain variable domain protein sequence |
| 300 | SCT-Ga371 mature heavy chain variable domain protein sequence |
| 301 | SCT-Ga372 mature heavy chain variable domain protein sequence |
| 302 | SCT-Ga374 mature heavy chain variable domain protein sequence |
| 303 | SCT-Ga376 mature heavy chain variable domain protein sequence |
| 304 | SCT-Ga377 mature heavy chain variable domain protein sequence |
| 305 | SCT-Ga378 mature heavy chain variable domain protein sequence |
| 306 | SCT-Ga379 mature heavy chain variable domain protein sequence |
| 307 | SCT-Ga380 mature heavy chain variable domain protein sequence |
| 308 | SCT-Ga381 mature heavy chain variable domain protein sequence |
| 309 | SCT-Ga382 mature heavy chain variable domain protein sequence |
| 310 | SCT-Ga383 mature heavy chain variable domain protein sequence |
| 311 | SCT-Ga384 mature heavy chain variable domain protein sequence |
| 311 | SCT-Ga390 mature heavy chain variable domain protein sequence |
| 312 | SCT-Ga385 mature heavy chain variable domain protein sequence |
| 313 | SCT-Ga386 mature heavy chain variable domain protein sequence |
| 313 | SCT-Ga402 mature heavy chain variable domain protein sequence |
| 314 | SCT-Ga387 mature heavy chain variable domain protein sequence |
| 315 | SCT-Ga388 mature heavy chain variable domain protein sequence |
| 315 | SCT-Ga398 mature heavy chain variable domain protein sequence |
| 316 | SCT-Ga389 mature heavy chain variable domain protein sequence |
| 317 | SCT-Ga391 mature heavy chain variable domain protein sequence |
| 318 | SCT-Ga392 mature heavy chain variable domain protein sequence |
| 319 | SCT-Ga393 mature heavy chain variable domain protein sequence |
| 319 | SCT-Ga438 mature heavy chain variable domain protein sequence |
| 320 | SCT-Ga394 mature heavy chain variable domain protein sequence |
| 321 | SCT-Ga395 mature heavy chain variable domain protein sequence |
| 322 | SCT-Ga396 mature heavy chain variable domain protein sequence |
| 323 | SCT-Ga397 mature heavy chain variable domain protein sequence |
| 324 | SCT-Ga399 mature heavy chain variable domain protein sequence |
| 325 | SCT-Ga400 mature heavy chain variable domain protein sequence |
| 326 | SCT-Ga401 mature heavy chain variable domain protein sequence |
| 327 | SCT-Ga403 mature heavy chain variable domain protein sequence |
| 328 | SCT-Ga404 mature heavy chain variable domain protein sequence |
| 329 | SCT-Ga405 mature heavy chain variable domain protein sequence |
| 330 | SCT-Ga406 mature heavy chain variable domain protein sequence |
| 331 | SCT-Ga407 mature heavy chain variable domain protein sequence |
| 332 | SCT-Ga408 mature heavy chain variable domain protein sequence |
| 333 | SCT-Ga409 mature heavy chain variable domain protein sequence |
| 334 | SCT-Ga410 mature heavy chain variable domain protein sequence |
| 335 | SCT-Ga411 mature heavy chain variable domain protein sequence |
| 336 | SCT-Ga412 mature heavy chain variable domain protein sequence |
| 337 | SCT-Ga413 mature heavy chain variable domain protein sequence |
| 338 | SCT-Ga414 mature heavy chain variable domain protein sequence |
| 339 | SCT-Ga415 mature heavy chain variable domain protein sequence |
| 340 | SCT-Ga416 mature heavy chain variable domain protein sequence |
| 341 | SCT-Ga417 mature heavy chain variable domain protein sequence |
| 342 | SCT-Ga418 mature heavy chain variable domain protein sequence |
| 343 | SCT-Ga419 mature heavy chain variable domain protein sequence |
| 344 | SCT-Ga420 mature heavy chain variable domain protein sequence |
| 345 | SCT-Ga421 mature heavy chain variable domain protein sequence |
| 346 | SCT-Ga422 mature heavy chain variable domain protein sequence |
| 347 | SCT-Ga423 mature heavy chain variable domain protein sequence |
| 348 | SCT-Ga424 mature heavy chain variable domain protein sequence |
| 349 | SCT-Ga425 mature heavy chain variable domain protein sequence |
| 350 | SCT-Ga426 mature heavy chain variable domain protein sequence |
| 351 | SCT-Ga427 mature heavy chain variable domain protein sequence |
| 352 | SCT-Ga428 mature heavy chain variable domain protein sequence |
| 353 | SCT-Ga429 mature heavy chain variable domain protein sequence |
| 354 | SCT-Ga430 mature heavy chain variable domain protein sequence |
| 355 | SCT-Ga431 mature heavy chain variable domain protein sequence |
| 356 | SCT-Ga432 mature heavy chain variable domain protein sequence |
| 357 | SCT-Ga433 mature heavy chain variable domain protein sequence |
| 358 | SCT-Ga434 mature heavy chain variable domain protein sequence |
| 359 | SCT-Ga435 mature heavy chain variable domain protein sequence |
| 360 | SCT-Ga436 mature heavy chain variable domain protein sequence |
| 361 | SCT-Ga437 mature heavy chain variable domain protein sequence |
| 362 | SCT-Ga439 mature heavy chain variable domain protein sequence |
| 363 | SCT-Ga440 mature heavy chain variable domain protein sequence |
| 364 | SCT-Ga441 mature heavy chain variable domain protein sequence |
| 365 | SCT-Ga442 mature heavy chain variable domain protein sequence |
| 366 | SCT-Ga443 mature heavy chain variable domain protein sequence |
| 367 | SCT-Ga444 mature heavy chain variable domain protein sequence |
| 368 | SCT-Ga445 mature heavy chain variable domain protein sequence |
| 369 | SCT-Ga446 mature heavy chain variable domain protein sequence |
| 370 | SCT-Ga447 mature heavy chain variable domain protein sequence |
| 371 | SCT-Ga448 mature heavy chain variable domain protein sequence |
| 372 | SCT-Ga449 mature heavy chain variable domain protein sequence |
| 373 | SCT-Ga450 mature heavy chain variable domain protein sequence |
| 374 | SCT-Ga451 mature heavy chain variable domain protein sequence |
| 375 | SCT-Ga452 mature heavy chain variable domain protein sequence |
| 376 | SCT-Ga453 mature heavy chain variable domain protein sequence |
| 377 | SCT-Ga454 mature heavy chain variable domain protein sequence |
| 378 | SCT-Ga455 mature heavy chain variable domain protein sequence |
| 379 | SCT-Ga456 mature heavy chain variable domain protein sequence |
| 380 | SCT-Ga001 mature light chain variable domain protein sequence |
| 380 | SCT-Ga038 mature light chain variable domain protein sequence |
| 381 | SCT-Ga002 mature light chain variable domain protein sequence |
| 381 | SCT-Ga003 mature light chain variable domain protein sequence |
| 381 | SCT-Ga005 mature light chain variable domain protein sequence |
| 381 | SCT-Ga006 mature light chain variable domain protein sequence |
| 381 | SCT-Ga008 mature light chain variable domain protein sequence |
| 381 | SCT-Ga011 mature light chain variable domain protein sequence |
| 381 | SCT-Ga013 mature light chain variable domain protein sequence |
| 381 | SCT-Ga014 mature light chain variable domain protein sequence |
| 381 | SCT-Ga018 mature light chain variable domain protein sequence |
| 381 | SCT-Ga020 mature light chain variable domain protein sequence |
| 381 | SCT-Ga022 mature light chain variable domain protein sequence |
| 381 | SCT-Ga023 mature light chain variable domain protein sequence |
| 381 | SCT-Ga025 mature light chain variable domain protein sequence |
| 381 | SCT-Ga030 mature light chain variable domain protein sequence |
| 381 | SCT-Ga032 mature light chain variable domain protein sequence |
| 381 | SCT-Ga047 mature light chain variable domain protein sequence |
| 381 | SCT-Ga058 mature light chain variable domain protein sequence |
| 381 | SCT-Ga060 mature light chain variable domain protein sequence |
| 381 | SCT-Ga061 mature light chain variable domain protein sequence |
| 381 | SCT-Ga064 mature light chain variable domain protein sequence |
| 381 | SCT-Ga070 mature light chain variable domain protein sequence |
| 381 | SCT-Ga072 mature light chain variable domain protein sequence |
| 381 | SCT-Ga078 mature light chain variable domain protein sequence |
| 381 | SCT-Ga079 mature light chain variable domain protein sequence |
| 381 | SCT-Ga080 mature light chain variable domain protein sequence |
| 381 | SCT-Ga081 mature light chain variable domain protein sequence |
| 381 | SCT-Ga082 mature light chain variable domain protein sequence |
| 381 | SCT-Ga083 mature light chain variable domain protein sequence |
| 381 | SCT-Ga085 mature light chain variable domain protein sequence |
| 381 | SCT-Ga086 mature light chain variable domain protein sequence |
| 381 | SCT-Ga090 mature light chain variable domain protein sequence |
| 381 | SCT-Ga091 mature light chain variable domain protein sequence |
| 381 | SCT-Ga094 mature light chain variable domain protein sequence |
| 381 | SCT-Ga097 mature light chain variable domain protein sequence |
| 381 | SCT-Ga098 mature light chain variable domain protein sequence |
| 381 | SCT-Ga107 mature light chain variable domain protein sequence |
| 381 | SCT-Ga108 mature light chain variable domain protein sequence |
| 381 | SCT-Ga109 mature light chain variable domain protein sequence |
| 381 | SCT-Ga114 mature light chain variable domain protein sequence |
| 381 | SCT-Ga116 mature light chain variable domain protein sequence |
| 381 | SCT-Ga117 mature light chain variable domain protein sequence |
| 381 | SCT-Ga118 mature light chain variable domain protein sequence |
| 381 | SCT-Ga119 mature light chain variable domain protein sequence |
| 381 | SCT-Ga128 mature light chain variable domain protein sequence |
| 381 | SCT-Ga129 mature light chain variable domain protein sequence |
| 381 | SCT-Ga130 mature light chain variable domain protein sequence |
| 381 | SCT-Ga138 mature light chain variable domain protein sequence |
| 381 | SCT-Ga144 mature light chain variable domain protein sequence |
| 381 | SCT-Ga145 mature light chain variable domain protein sequence |
| 381 | SCT-Ga151 mature light chain variable domain protein sequence |
| 381 | SCT-Ga153 mature light chain variable domain protein sequence |
| 381 | SCT-Ga155 mature light chain variable domain protein sequence |
| 381 | SCT-Ga160 mature light chain variable domain protein sequence |
| 381 | SCT-Ga163 mature light chain variable domain protein sequence |
| 381 | SCT-Ga164 mature light chain variable domain protein sequence |
| 381 | SCT-Ga165 mature light chain variable domain protein sequence |
| 381 | SCT-Ga168 mature light chain variable domain protein sequence |
| 381 | SCT-Ga170 mature light chain variable domain protein sequence |
| 381 | SCT-Ga171 mature light chain variable domain protein sequence |
| 381 | SCT-Ga172 mature light chain variable domain protein sequence |
| 381 | SCT-Ga437 mature light chain variable domain protein sequence |
| 381 | SCT-Ga449 mature light chain variable domain protein sequence |
| 382 | SCT-Ga004 mature light chain variable domain protein sequence |
| 382 | SCT-Ga044 mature light chain variable domain protein sequence |
| 382 | SCT-Ga050 mature light chain variable domain protein sequence |
| 382 | SCT-Ga124 mature light chain variable domain protein sequence |
| 382 | SCT-Ga166 mature light chain variable domain protein sequence |
| 383 | SCT-Ga007 mature light chain variable domain protein sequence |
| 384 | SCT-Ga009 mature light chain variable domain protein sequence |
| 385 | SCT-Ga010 mature light chain variable domain protein sequence |
| 385 | SCT-Ga068 mature light chain variable domain protein sequence |
| 385 | SCT-Ga084 mature light chain variable domain protein sequence |
| 385 | SCT-Ga089 mature light chain variable domain protein sequence |
| 385 | SCT-Ga123 mature light chain variable domain protein sequence |
| 385 | SCT-Ga135 mature light chain variable domain protein sequence |
| 385 | SCT-Ga139 mature light chain variable domain protein sequence |
| 386 | SCT-Ga012 mature light chain variable domain protein sequence |
| 387 | SCT-Ga015 mature light chain variable domain protein sequence |
| 388 | SCT-Ga016 mature light chain variable domain protein sequence |
| 389 | SCT-Ga017 mature light chain variable domain protein sequence |
| 389 | SCT-Ga150 mature light chain variable domain protein sequence |
| 390 | SCT-Ga019 mature light chain variable domain protein sequence |
| 391 | SCT-Ga021 mature light chain variable domain protein sequence |
| 392 | SCT-Ga024 mature light chain variable domain protein sequence |
| 393 | SCT-Ga026 mature light chain variable domain protein sequence |
| 394 | SCT-Ga027 mature light chain variable domain protein sequence |
| 395 | SCT-Ga028 mature light chain variable domain protein sequence |
| 396 | SCT-Ga029 mature light chain variable domain protein sequence |
| 396 | SCT-Ga167 mature light chain variable domain protein sequence |
| 397 | SCT-Ga031 mature light chain variable domain protein sequence |
| 398 | SCT-Ga033 mature light chain variable domain protein sequence |
| 398 | SCT-Ga040 mature light chain variable domain protein sequence |
| 398 | SCT-Ga046 mature light chain variable domain protein sequence |
| 398 | SCT-Ga111 mature light chain variable domain protein sequence |
| 398 | SCT-Ga143 mature light chain variable domain protein sequence |
| 398 | SCT-Ga158 mature light chain variable domain protein sequence |
| 398 | SCT-Ga162 mature light chain variable domain protein sequence |
| 398 | SCT-Ga173 mature light chain variable domain protein sequence |
| 399 | SCT-Ga034 mature light chain variable domain protein sequence |
| 399 | SCT-Ga048 mature light chain variable domain protein sequence |
| 400 | SCT-Ga035 mature light chain variable domain protein sequence |
| 401 | SCT-Ga036 mature light chain variable domain protein sequence |
| 401 | SCT-Ga067 mature light chain variable domain protein sequence |
| 402 | SCT-Ga037 mature light chain variable domain protein sequence |
| 403 | SCT-Ga039 mature light chain variable domain protein sequence |
| 404 | SCT-Ga041 mature light chain variable domain protein sequence |
| 404 | SCT-Ga126 mature light chain variable domain protein sequence |
| 405 | SCT-Ga042 mature light chain variable domain protein sequence |
| 406 | SCT-Ga043 mature light chain variable domain protein sequence |
| 406 | SCT-Ga045 mature light chain variable domain protein sequence |
| 406 | SCT-Ga148 mature light chain variable domain protein sequence |
| 407 | SCT-Ga049 mature light chain variable domain protein sequence |
| 408 | SCT-Ga051 mature light chain variable domain protein sequence |
| 409 | SCT-Ga052 mature light chain variable domain protein sequence |
| 410 | SCT-Ga053 mature light chain variable domain protein sequence |
| 410 | SCT-Ga127 mature light chain variable domain protein sequence |
| 411 | SCT-Ga054 mature light chain variable domain protein sequence |
| 412 | SCT-Ga055 mature light chain variable domain protein sequence |
| 413 | SCT-Ga056 mature light chain variable domain protein sequence |
| 414 | SCT-Ga057 mature light chain variable domain protein sequence |
| 415 | SCT-Ga059 mature light chain variable domain protein sequence |
| 416 | SCT-Ga062 mature light chain variable domain protein sequence |
| 417 | SCT-Ga063 mature light chain variable domain protein sequence |
| 418 | SCT-Ga065 mature light chain variable domain protein sequence |
| 419 | SCT-Ga066 mature light chain variable domain protein sequence |
| 420 | SCT-Ga069 mature light chain variable domain protein sequence |
| 421 | SCT-Ga071 mature light chain variable domain protein sequence |
| 422 | SCT-Ga073 mature light chain variable domain protein sequence |
| 423 | SCT-Ga074 mature light chain variable domain protein sequence |
| 424 | SCT-Ga075 mature light chain variable domain protein sequence |
| 425 | SCT-Ga076 mature light chain variable domain protein sequence |
| 426 | SCT-Ga077 mature light chain variable domain protein sequence |
| 427 | SCT-Ga087 mature light chain variable domain protein sequence |
| 428 | SCT-Ga088 mature light chain variable domain protein sequence |
| 429 | SCT-Ga092 mature light chain variable domain protein sequence |
| 430 | SCT-Ga093 mature light chain variable domain protein sequence |
| 431 | SCT-Ga095 mature light chain variable domain protein sequence |
| 432 | SCT-Ga096 mature light chain variable domain protein sequence |
| 433 | SCT-Ga099 mature light chain variable domain protein sequence |
| 434 | SCT-Ga100 mature light chain variable domain protein sequence |
| 435 | SCT-Ga101 mature light chain variable domain protein sequence |
| 436 | SCT-Ga102 mature light chain variable domain protein sequence |
| 437 | SCT-Ga103 mature light chain variable domain protein sequence |
| 438 | SCT-Ga104 mature light chain variable domain protein sequence |
| 439 | SCT-Ga105 mature light chain variable domain protein sequence |
| 440 | SCT-Ga106 mature light chain variable domain protein sequence |
| 441 | SCT-Ga110 mature light chain variable domain protein sequence |
| 442 | SCT-Ga112 mature light chain variable domain protein sequence |
| 443 | SCT-Ga113 mature light chain variable domain protein sequence |
| 444 | SCT-Ga115 mature light chain variable domain protein sequence |
| 445 | SCT-Ga120 mature light chain variable domain protein sequence |
| 445 | SCT-Ga154 mature light chain variable domain protein sequence |
| 446 | SCT-Ga121 mature light chain variable domain protein sequence |
| 447 | SCT-Ga122 mature light chain variable domain protein sequence |
| 448 | SCT-Ga125 mature light chain variable domain protein sequence |
| 449 | SCT-Ga131 mature light chain variable domain protein sequence |
| 450 | SCT-Ga132 mature light chain variable domain protein sequence |
| 451 | SCT-Ga133 mature light chain variable domain protein sequence |
| 451 | SCT-Ga149 mature light chain variable domain protein sequence |
| 451 | SCT-Ga152 mature light chain variable domain protein sequence |
| 452 | SCT-Ga134 mature light chain variable domain protein sequence |
| 453 | SCT-Ga136 mature light chain variable domain protein sequence |
| 454 | SCT-Ga137 mature light chain variable domain protein sequence |
| 455 | SCT-Ga140 mature light chain variable domain protein sequence |
| 456 | SCT-Ga141 mature light chain variable domain protein sequence |
| 456 | SCT-Ga142 mature light chain variable domain protein sequence |
| 457 | SCT-Ga146 mature light chain variable domain protein sequence |
| 458 | SCT-Ga147 mature light chain variable domain protein sequence |
| 459 | SCT-Ga156 mature light chain variable domain protein sequence |
| 460 | SCT-Ga157 mature light chain variable domain protein sequence |
| 461 | SCT-Ga159 mature light chain variable domain protein sequence |
| 462 | SCT-Ga161 mature light chain variable domain protein sequence |
| 462 | SCT-Ga174 mature light chain variable domain protein sequence |
| 463 | SCT-Ga169 mature light chain variable domain protein sequence |
| 464 | SCT-Ga175 mature light chain variable domain protein sequence |
| 465 | SCT-Ga176 mature light chain variable domain protein sequence |
| 466 | SCT-Ga177 mature light chain variable domain protein sequence |
| 466 | SCT-Ga281 mature light chain variable domain protein sequence |
| 466 | SCT-Ga342 mature light chain variable domain protein sequence |
| 466 | SCT-Ga370 mature light chain variable domain protein sequence |
| 467 | SCT-Ga178 mature light chain variable domain protein sequence |
| 468 | SCT-Ga179 mature light chain variable domain protein sequence |
| 469 | SCT-Ga180 mature light chain variable domain protein sequence |
| 469 | SCT-Ga222 mature light chain variable domain protein sequence |
| 469 | SCT-Ga267 mature light chain variable domain protein sequence |
| 469 | SCT-Ga336 mature light chain variable domain protein sequence |
| 470 | SCT-Ga181 mature light chain variable domain protein sequence |
| 471 | SCT-Ga182 mature light chain variable domain protein sequence |
| 472 | SCT-Ga183 mature light chain variable domain protein sequence |
| 473 | SCT-Ga184 mature light chain variable domain protein sequence |
| 474 | SCT-Ga185 mature light chain variable domain protein sequence |
| 474 | SCT-Ga202 mature light chain variable domain protein sequence |
| 475 | SCT-Ga186 mature light chain variable domain protein sequence |
| 476 | SCT-Ga187 mature light chain variable domain protein sequence |
| 477 | SCT-Ga188 mature light chain variable domain protein sequence |
| 478 | SCT-Ga189 mature light chain variable domain protein sequence |
| 479 | SCT-Ga190 mature light chain variable domain protein sequence |
| 479 | SCT-Ga214 mature light chain variable domain protein sequence |
| 480 | SCT-Ga191 mature light chain variable domain protein sequence |
| 481 | SCT-Ga192 mature light chain variable domain protein sequence |
| 482 | SCT-Ga193 mature light chain variable domain protein sequence |
| 482 | SCT-Ga262 mature light chain variable domain protein sequence |
| 482 | SCT-Ga303 mature light chain variable domain protein sequence |
| 482 | SCT-Ga313 mature light chain variable domain protein sequence |
| 482 | SCT-Ga346 mature light chain variable domain protein sequence |
| 482 | SCT-Ga401 mature light chain variable domain protein sequence |
| 482 | SCT-Ga431 mature light chain variable domain protein sequence |
| 482 | SCT-Ga440 mature light chain variable domain protein sequence |
| 482 | SCT-Ga453 mature light chain variable domain protein sequence |
| 483 | SCT-Ga194 mature light chain variable domain protein sequence |
| 483 | SCT-Ga421 mature light chain variable domain protein sequence |
| 484 | SCT-Ga195 mature light chain variable domain protein sequence |
| 485 | SCT-Ga196 mature light chain variable domain protein sequence |
| 486 | SCT-Ga197 mature light chain variable domain protein sequence |
| 486 | SCT-Ga211 mature light chain variable domain protein sequence |
| 487 | SCT-Ga198 mature light chain variable domain protein sequence |
| 488 | SCT-Ga199 mature light chain variable domain protein sequence |
| 489 | SCT-Ga200 mature light chain variable domain protein sequence |
| 490 | SCT-Ga201 mature light chain variable domain protein sequence |
| 491 | SCT-Ga203 mature light chain variable domain protein sequence |
| 492 | SCT-Ga204 mature light chain variable domain protein sequence |
| 493 | SCT-Ga205 mature light chain variable domain protein sequence |
| 494 | SCT-Ga206 mature light chain variable domain protein sequence |
| 495 | SCT-Ga207 mature light chain variable domain protein sequence |
| 496 | SCT-Ga208 mature light chain variable domain protein sequence |
| 497 | SCT-Ga209 mature light chain variable domain protein sequence |
| 498 | SCT-Ga210 mature light chain variable domain protein sequence |
| 499 | SCT-Ga212 mature light chain variable domain protein sequence |
| 500 | SCT-Ga213 mature light chain variable domain protein sequence |
| 501 | SCT-Ga215 mature light chain variable domain protein sequence |
| 502 | SCT-Ga216 mature light chain variable domain protein sequence |
| 503 | SCT-Ga217 mature light chain variable domain protein sequence |
| 504 | SCT-Ga218 mature light chain variable domain protein sequence |
| 505 | SCT-Ga219 mature light chain variable domain protein sequence |
| 506 | SCT-Ga220 mature light chain variable domain protein sequence |
| 506 | SCT-Ga331 mature light chain variable domain protein sequence |
| 507 | SCT-Ga221 mature light chain variable domain protein sequence |
| 508 | SCT-Ga223 mature light chain variable domain protein sequence |
| 509 | SCT-Ga224 mature light chain variable domain protein sequence |
| 510 | SCT-Ga225 mature light chain variable domain protein sequence |
| 511 | SCT-Ga226 mature light chain variable domain protein sequence |
| 512 | SCT-Ga227 mature light chain variable domain protein sequence |
| 512 | SCT-Ga365 mature light chain variable domain protein sequence |
| 513 | SCT-Ga228 mature light chain variable domain protein sequence |
| 514 | SCT-Ga229 mature light chain variable domain protein sequence |
| 515 | SCT-Ga230 mature light chain variable domain protein sequence |
| 515 | SCT-Ga258 mature light chain variable domain protein sequence |
| 515 | SCT-Ga329 mature light chain variable domain protein sequence |
| 516 | SCT-Ga231 mature light chain variable domain protein sequence |
| 517 | SCT-Ga232 mature light chain variable domain protein sequence |
| 517 | SCT-Ga292 mature light chain variable domain protein sequence |
| 518 | SCT-Ga233 mature light chain variable domain protein sequence |
| 519 | SCT-Ga234 mature light chain variable domain protein sequence |
| 520 | SCT-Ga235 mature light chain variable domain protein sequence |
| 521 | SCT-Ga236 mature light chain variable domain protein sequence |
| 522 | SCT-Ga237 mature light chain variable domain protein sequence |
| 523 | SCT-Ga238 mature light chain variable domain protein sequence |
| 524 | SCT-Ga239 mature light chain variable domain protein sequence |
| 525 | SCT-Ga240 mature light chain variable domain protein sequence |
| 526 | SCT-Ga241 mature light chain variable domain protein sequence |
| 527 | SCT-Ga242 mature light chain variable domain protein sequence |
| 527 | SCT-Ga260 mature light chain variable domain protein sequence |
| 528 | SCT-Ga243 mature light chain variable domain protein sequence |
| 529 | SCT-Ga244 mature light chain variable domain protein sequence |
| 529 | SCT-Ga272 mature light chain variable domain protein sequence |
| 529 | SCT-Ga362 mature light chain variable domain protein sequence |
| 530 | SCT-Ga245 mature light chain variable domain protein sequence |
| 531 | SCT-Ga246 mature light chain variable domain protein sequence |
| 531 | SCT-Ga309 mature light chain variable domain protein sequence |
| 531 | SCT-Ga375 mature light chain variable domain protein sequence |
| 532 | SCT-Ga247 mature light chain variable domain protein sequence |
| 533 | SCT-Ga248 mature light chain variable domain protein sequence |
| 534 | SCT-Ga249 mature light chain variable domain protein sequence |
| 535 | SCT-Ga250 mature light chain variable domain protein sequence |
| 536 | SCT-Ga251 mature light chain variable domain protein sequence |
| 537 | SCT-Ga252 mature light chain variable domain protein sequence |
| 538 | SCT-Ga253 mature light chain variable domain protein sequence |
| 539 | SCT-Ga254 mature light chain variable domain protein sequence |
| 540 | SCT-Ga255 mature light chain variable domain protein sequence |
| 540 | SCT-Ga301 mature light chain variable domain protein sequence |
| 541 | SCT-Ga256 mature light chain variable domain protein sequence |
| 542 | SCT-Ga257 mature light chain variable domain protein sequence |
| 543 | SCT-Ga259 mature light chain variable domain protein sequence |
| 544 | SCT-Ga261 mature light chain variable domain protein sequence |
| 545 | SCT-Ga263 mature light chain variable domain protein sequence |
| 546 | SCT-Ga264 mature light chain variable domain protein sequence |
| 547 | SCT-Ga265 mature light chain variable domain protein sequence |
| 548 | SCT-Ga266 mature light chain variable domain protein sequence |
| 549 | SCT-Ga268 mature light chain variable domain protein sequence |
| 550 | SCT-Ga269 mature light chain variable domain protein sequence |
| 551 | SCT-Ga270 mature light chain variable domain protein sequence |
| 552 | SCT-Ga271 mature light chain variable domain protein sequence |
| 552 | SCT-Ga276 mature light chain variable domain protein sequence |
| 552 | SCT-Ga334 mature light chain variable domain protein sequence |
| 552 | SCT-Ga384 mature light chain variable domain protein sequence |
| 552 | SCT-Ga394 mature light chain variable domain protein sequence |
| 552 | SCT-Ga414 mature light chain variable domain protein sequence |
| 553 | SCT-Ga273 mature light chain variable domain protein sequence |
| 554 | SCT-Ga274 mature light chain variable domain protein sequence |
| 555 | SCT-Ga275 mature light chain variable domain protein sequence |
| 556 | SCT-Ga277 mature light chain variable domain protein sequence |
| 557 | SCT-Ga278 mature light chain variable domain protein sequence |
| 558 | SCT-Ga279 mature light chain variable domain protein sequence |
| 559 | SCT-Ga280 mature light chain variable domain protein sequence |
| 560 | SCT-Ga282 mature light chain variable domain protein sequence |
| 561 | SCT-Ga283 mature light chain variable domain protein sequence |
| 562 | SCT-Ga284 mature light chain variable domain protein sequence |
| 563 | SCT-Ga285 mature light chain variable domain protein sequence |
| 564 | SCT-Ga286 mature light chain variable domain protein sequence |
| 565 | SCT-Ga287 mature light chain variable domain protein sequence |
| 566 | SCT-Ga288 mature light chain variable domain protein sequence |
| 567 | SCT-Ga289 mature light chain variable domain protein sequence |
| 568 | SCT-Ga290 mature light chain variable domain protein sequence |
| 569 | SCT-Ga291 mature light chain variable domain protein sequence |
| 570 | SCT-Ga293 mature light chain variable domain protein sequence |
| 571 | SCT-Ga294 mature light chain variable domain protein sequence |
| 572 | SCT-Ga295 mature light chain variable domain protein sequence |
| 572 | SCT-Ga360 mature light chain variable domain protein sequence |
| 572 | SCT-Ga406 mature light chain variable domain protein sequence |
| 572 | SCT-Ga419 mature light chain variable domain protein sequence |
| 572 | SCT-Ga424 mature light chain variable domain protein sequence |
| 572 | SCT-Ga435 mature light chain variable domain protein sequence |
| 572 | SCT-Ga455 mature light chain variable domain protein sequence |
| 573 | SCT-Ga296 mature light chain variable domain protein sequence |
| 574 | SCT-Ga297 mature light chain variable domain protein sequence |
| 575 | SCT-Ga298 mature light chain variable domain protein sequence |
| 576 | SCT-Ga299 mature light chain variable domain protein sequence |
| 577 | SCT-Ga300 mature light chain variable domain protein sequence |
| 578 | SCT-Ga302 mature light chain variable domain protein sequence |
| 579 | SCT-Ga304 mature light chain variable domain protein sequence |
| 580 | SCT-Ga305 mature light chain variable domain protein sequence |
| 580 | SCT-Ga372 mature light chain variable domain protein sequence |
| 581 | SCT-Ga306 mature light chain variable domain protein sequence |
| 582 | SCT-Ga307 mature light chain variable domain protein sequence |
| 583 | SCT-Ga308 mature light chain variable domain protein sequence |
| 584 | SCT-Ga310 mature light chain variable domain protein sequence |
| 585 | SCT-Ga311 mature light chain variable domain protein sequence |
| 586 | SCT-Ga312 mature light chain variable domain protein sequence |
| 587 | SCT-Ga314 mature light chain variable domain protein sequence |
| 588 | SCT-Ga315 mature light chain variable domain protein sequence |
| 589 | SCT-Ga316 mature light chain variable domain protein sequence |
| 590 | SCT-Ga317 mature light chain variable domain protein sequence |
| 591 | SCT-Ga318 mature light chain variable domain protein sequence |
| 592 | SCT-Ga319 mature light chain variable domain protein sequence |
| 593 | SCT-Ga320 mature light chain variable domain protein sequence |
| 594 | SCT-Ga321 mature light chain variable domain protein sequence |
| 595 | SCT-Ga322 mature light chain variable domain protein sequence |
| 596 | SCT-Ga323 mature light chain variable domain protein sequence |
| 596 | SCT-Ga324 mature light chain variable domain protein sequence |
| 596 | SCT-Ga339 mature light chain variable domain protein sequence |
| 596 | SCT-Ga380 mature light chain variable domain protein sequence |
| 597 | SCT-Ga325 mature light chain variable domain protein sequence |
| 598 | SCT-Ga326 mature light chain variable domain protein sequence |
| 599 | SCT-Ga327 mature light chain variable domain protein sequence |
| 600 | SCT-Ga328 mature light chain variable domain protein sequence |
| 601 | SCT-Ga330 mature light chain variable domain protein sequence |
| 602 | SCT-Ga332 mature light chain variable domain protein sequence |
| 603 | SCT-Ga333 mature light chain variable domain protein sequence |
| 604 | SCT-Ga335 mature light chain variable domain protein sequence |
| 605 | SCT-Ga337 mature light chain variable domain protein sequence |
| 606 | SCT-Ga338 mature light chain variable domain protein sequence |
| 607 | SCT-Ga340 mature light chain variable domain protein sequence |
| 608 | SCT-Ga341 mature light chain variable domain protein sequence |
| 608 | SCT-Ga351 mature light chain variable domain protein sequence |
| 609 | SCT-Ga343 mature light chain variable domain protein sequence |
| 610 | SCT-Ga344 mature light chain variable domain protein sequence |
| 611 | SCT-Ga345 mature light chain variable domain protein sequence |
| 612 | SCT-Ga347 mature light chain variable domain protein sequence |
| 612 | SCT-Ga377 mature light chain variable domain protein sequence |
| 613 | SCT-Ga348 mature light chain variable domain protein sequence |
| 614 | SCT-Ga349 mature light chain variable domain protein sequence |
| 615 | SCT-Ga350 mature light chain variable domain protein sequence |
| 616 | SCT-Ga352 mature light chain variable domain protein sequence |
| 617 | SCT-Ga353 mature light chain variable domain protein sequence |
| 618 | SCT-Ga354 mature light chain variable domain protein sequence |
| 619 | SCT-Ga355 mature light chain variable domain protein sequence |
| 620 | SCT-Ga356 mature light chain variable domain protein sequence |
| 621 | SCT-Ga357 mature light chain variable domain protein sequence |
| 622 | SCT-Ga358 mature light chain variable domain protein sequence |
| 623 | SCT-Ga359 mature light chain variable domain protein sequence |
| 624 | SCT-Ga361 mature light chain variable domain protein sequence |
| 625 | SCT-Ga363 mature light chain variable domain protein sequence |
| 626 | SCT-Ga364 mature light chain variable domain protein sequence |
| 627 | SCT-Ga366 mature light chain variable domain protein sequence |
| 628 | SCT-Ga367 mature light chain variable domain protein sequence |
| 629 | SCT-Ga368 mature light chain variable domain protein sequence |
| 630 | SCT-Ga369 mature light chain variable domain protein sequence |
| 631 | SCT-Ga371 mature light chain variable domain protein sequence |
| 632 | SCT-Ga373 mature light chain variable domain protein sequence |
| 633 | SCT-Ga374 mature light chain variable domain protein sequence |
| 634 | SCT-Ga376 mature light chain variable domain protein sequence |
| 635 | SCT-Ga378 mature light chain variable domain protein sequence |
| 636 | SCT-Ga379 mature light chain variable domain protein sequence |
| 637 | SCT-Ga381 mature light chain variable domain protein sequence |
| 638 | SCT-Ga382 mature light chain variable domain protein sequence |
| 639 | SCT-Ga383 mature light chain variable domain protein sequence |
| 640 | SCT-Ga385 mature light chain variable domain protein sequence |
| 641 | SCT-Ga386 mature light chain variable domain protein sequence |
| 642 | SCT-Ga387 mature light chain variable domain protein sequence |
| 643 | SCT-Ga388 mature light chain variable domain protein sequence |
| 643 | SCT-Ga413 mature light chain variable domain protein sequence |
| 643 | SCT-Ga426 mature light chain variable domain protein sequence |
| 644 | SCT-Ga389 mature light chain variable domain protein sequence |
| 645 | SCT-Ga390 mature light chain variable domain protein sequence |
| 645 | SCT-Ga391 mature light chain variable domain protein sequence |
| 645 | SCT-Ga402 mature light chain variable domain protein sequence |
| 645 | SCT-Ga417 mature light chain variable domain protein sequence |
| 645 | SCT-Ga441 mature light chain variable domain protein sequence |
| 645 | SCT-Ga447 mature light chain variable domain protein sequence |
| 646 | SCT-Ga392 mature light chain variable domain protein sequence |
| 647 | SCT-Ga393 mature light chain variable domain protein sequence |
| 648 | SCT-Ga395 mature light chain variable domain protein sequence |
| 649 | SCT-Ga396 mature light chain variable domain protein sequence |
| 650 | SCT-Ga397 mature light chain variable domain protein sequence |
| 651 | SCT-Ga398 mature light chain variable domain protein sequence |
| 652 | SCT-Ga399 mature light chain variable domain protein sequence |
| 652 | SCT-Ga408 mature light chain variable domain protein sequence |
| 653 | SCT-Ga400 mature light chain variable domain protein sequence |
| 654 | SCT-Ga403 mature light chain variable domain protein sequence |
| 655 | SCT-Ga404 mature light chain variable domain protein sequence |
| 656 | SCT-Ga405 mature light chain variable domain protein sequence |
| 657 | SCT-Ga407 mature light chain variable domain protein sequence |
| 658 | SCT-Ga409 mature light chain variable domain protein sequence |
| 658 | SCT-Ga434 mature light chain variable domain protein sequence |
| 659 | SCT-Ga410 mature light chain variable domain protein sequence |
| 660 | SCT-Ga411 mature light chain variable domain protein sequence |
| 661 | SCT-Ga412 mature light chain variable domain protein sequence |
| 662 | SCT-Ga415 mature light chain variable domain protein sequence |
| 663 | SCT-Ga416 mature light chain variable domain protein sequence |
| 664 | SCT-Ga418 mature light chain variable domain protein sequence |
| 665 | SCT-Ga420 mature light chain variable domain protein sequence |
| 666 | SCT-Ga422 mature light chain variable domain protein sequence |
| 667 | SCT-Ga423 mature light chain variable domain protein sequence |
| 667 | SCT-Ga456 mature light chain variable domain protein sequence |
| 668 | SCT-Ga425 mature light chain variable domain protein sequence |
| 669 | SCT-Ga427 mature light chain variable domain protein sequence |
| 669 | SCT-Ga428 mature light chain variable domain protein sequence |
| 670 | SCT-Ga429 mature light chain variable domain protein sequence |
| 671 | SCT-Ga430 mature light chain variable domain protein sequence |
| 672 | SCT-Ga432 mature light chain variable domain protein sequence |
| 673 | SCT-Ga433 mature light chain variable domain protein sequence |
| 674 | SCT-Ga436 mature light chain variable domain protein sequence |
| 675 | SCT-Ga438 mature light chain variable domain protein sequence |
| 676 | SCT-Ga439 mature light chain variable domain protein sequence |
| 677 | SCT-Ga442 mature light chain variable domain protein sequence |
| 678 | SCT-Ga443 mature light chain variable domain protein sequence |
| 679 | SCT-Ga444 mature light chain variable domain protein sequence |
| 680 | SCT-Ga445 mature light chain variable domain protein sequence |
| 681 | SCT-Ga446 mature light chain variable domain protein sequence |
| 682 | SCT-Ga448 mature light chain variable domain protein sequence |
| 683 | SCT-Ga450 mature light chain variable domain protein sequence |
| 684 | SCT-Ga451 mature light chain variable domain protein sequence |
| 685 | SCT-Ga452 mature light chain variable domain protein sequence |
| 686 | SCT-Ga454 mature light chain variable domain protein sequence |
| 1366 | SCT-Ga457 mature heavy chain variable domain protein sequence |
| 1366 | SCT-Ga458 mature heavy chain variable domain protein sequence |
| 1367 | SCT-Ga457 mature light chain variable domain protein sequence |
| 1368 | SCT-Ga458 mature light chain variable domain protein sequence |
| 1369 | SCT-Ga459 mature heavy chain variable domain protein sequence |
| 1369 | SCT-Ga460 mature heavy chain variable domain protein sequence |
| 1370 | SCT-Ga459 mature light chain variable domain protein sequence |
| 1370 | SCT-Ga461 mature light chain variable domain protein sequence |
| 1371 | SCT-Ga460 mature light chain variable domain protein sequence |
| 1371 | SCT-Ga462 mature light chain variable domain protein sequence |
| 1372 | SCT-Ga461 mature heavy chain variable domain protein sequence |
| 1372 | SCT-Ga462 mature heavy chain variable domain protein sequence |
| 1373 | SCT-Ga463 mature heavy chain variable domain protein sequence |
| 1373 | SCT-Ga464 mature heavy chain variable domain protein sequence |
| 1374 | SCT-Ga463 mature light chain variable domain protein sequence |
| 1374 | SCT-Ga465 mature light chain variable domain protein sequence |
| 1374 | SCT-Ga493 mature light chain variable domain protein sequence |
| 1374 | SCT-Ga495 mature light chain variable domain protein sequence |
| 1375 | SCT-Ga464 mature light chain variable domain protein sequence |
| 1375 | SCT-Ga466 mature light chain variable domain protein sequence |
| 1376 | SCT-Ga465 mature heavy chain variable domain protein sequence |
| 1376 | SCT-Ga466 mature heavy chain variable domain protein sequence |
| 1377 | SCT-Ga467 mature heavy chain variable domain protein sequence |
| 1377 | SCT-Ga468 mature heavy chain variable domain protein sequence |
| 1378 | SCT-Ga467 mature light chain variable domain protein sequence |
| 1378 | SCT-Ga469 mature light chain variable domain protein sequence |
| 1379 | SCT-Ga468 mature light chain variable domain protein sequence |
| 1379 | SCT-Ga470 mature light chain variable domain protein sequence |
| 1380 | SCT-Ga469 mature heavy chain variable domain protein sequence |
| 1380 | SCT-Ga470 mature heavy chain variable domain protein sequence |
| 1381 | SCT-Ga471 mature heavy chain variable domain protein sequence |
| 1381 | SCT-Ga472 mature heavy chain variable domain protein sequence |
| 1382 | SCT-Ga471 mature light chain variable domain protein sequence |
| 1382 | SCT-Ga473 mature light chain variable domain protein sequence |
| 1382 | SCT-Ga490 mature light chain variable domain protein sequence |
| 1382 | SCT-Ga491 mature light chain variable domain protein sequence |
| 1382 | SCT-Ga492 mature light chain variable domain protein sequence |
| 1383 | SCT-Ga472 mature light chain variable domain protein sequence |
| 1383 | SCT-Ga474 mature light chain variable domain protein sequence |
| 1384 | SCT-Ga473 mature heavy chain variable domain protein sequence |
| 1384 | SCT-Ga474 mature heavy chain variable domain protein sequence |
| 1385 | SCT-Ga475 mature heavy chain variable domain protein sequence |
| 1385 | SCT-Ga476 mature heavy chain variable domain protein sequence |
| 1386 | SCT-Ga475 mature light chain variable domain protein sequence |
| 1386 | SCT-Ga477 mature light chain variable domain protein sequence |
| 1386 | SCT-Ga484 mature light chain variable domain protein sequence |
| 1386 | SCT-Ga485 mature light chain variable domain protein sequence |
| 1386 | SCT-Ga486 mature light chain variable domain protein sequence |
| 1387 | SCT-Ga476 mature light chain variable domain protein sequence |
| 1387 | SCT-Ga478 mature light chain variable domain protein sequence |
| 1388 | SCT-Ga477 mature heavy chain variable domain protein sequence |
| 1388 | SCT-Ga478 mature heavy chain variable domain protein sequence |
| 1389 | SCT-Ga479 mature heavy chain variable domain protein sequence |
| 1390 | SCT-Ga479 mature light chain variable domain protein sequence |
| 1391 | SCT-Ga480 mature heavy chain variable domain protein sequence |
| 1391 | SCT-Ga481 mature heavy chain variable domain protein sequence |
| 1392 | SCT-Ga480 mature light chain variable domain protein sequence |
| 1392 | SCT-Ga482 mature light chain variable domain protein sequence |
| 1393 | SCT-Ga481 mature light chain variable domain protein sequence |
| 1393 | SCT-Ga483 mature light chain variable domain protein sequence |
| 1394 | SCT-Ga482 mature heavy chain variable domain protein sequence |
| 1394 | SCT-Ga483 mature heavy chain variable domain protein sequence |
| 1395 | SCT-Ga484 mature heavy chain variable domain protein sequence |
| 1396 | SCT-Ga485 mature heavy chain variable domain protein sequence |
| 1397 | SCT-Ga486 mature heavy chain variable domain protein sequence |
| 1398 | SCT-Ga487 mature heavy chain variable domain protein sequence |
| 1398 | SCT-Ga490 mature heavy chain variable domain protein sequence |
| 1399 | SCT-Ga487 mature light chain variable domain protein sequence |
| 1399 | SCT-Ga488 mature light chain variable domain protein sequence |
| 1399 | SCT-Ga489 mature light chain variable domain protein sequence |
| 1400 | SCT-Ga488 mature heavy chain variable domain protein sequence |
| 1400 | SCT-Ga491 mature heavy chain variable domain protein sequence |
| 1401 | SCT-Ga489 mature heavy chain variable domain protein sequence |
| 1401 | SCT-Ga492 mature heavy chain variable domain protein sequence |
| 1402 | SCT-Ga493 mature heavy chain variable domain protein sequence |
| 1402 | SCT-Ga494 mature heavy chain variable domain protein sequence |
| 1403 | SCT-Ga494 mature light chain variable domain protein sequence |
| 1403 | SCT-Ga496 mature light chain variable domain protein sequence |
| 1404 | SCT-Ga495 mature heavy chain variable domain protein sequence |
| 1404 | SCT-Ga496 mature heavy chain variable domain protein sequence |
| 1405 | SCT-Ga497 mature heavy chain variable domain protein sequence |
| 1405 | SCT-Ga498 mature heavy chain variable domain protein sequence |
| 1406 | SCT-Ga497 mature light chain variable domain protein sequence |
| 1407 | SCT-Ga498 mature light chain variable domain protein sequence |

### BRIEF DESCRIPTION OF THE DRAWINGS

[0010] FIG. 1. shows interaction analysis of human TIGIT with select subset of anti-TIGIT antibodies by ELISA.

[0011] FIG. 2. shows dose-dependent blockade of anti-human TIGIT antibody using Promega's TIGIT blockade bioassay against a benchmark antibody, MK-7684.

[0012] FIG. 3. shows combination assay pairing with anti-PD-1 antibody using a Promega's kit. PM: Promega. The anti-PD-1 antibody (Cat. No. J1201) and anti-TIGIT antibody (Cat. No. J2051) were provided by Promega. Every plot shows a synergistic effect between anti-PD-1 antibody and anti-TIGIT antibody. FIG. 3E shows SCT-Ga461 and SCT-Ga462, both of which are humanized antibodies, have activity comparable to that of their murine counterpart (SCT-Ga433).

### DETAILED DESCRIPTION

[0013] The disclosure provides antibodies that bind to TIGIT. In one embodiment, the disclosure provides an isolated antibody that binds to SEQ ID NO:1.

### Antibodies

[0014] The disclosure provides antibodies that bind specifically to SEQ ID NO:1. The term “antibody” as used herein, includes both full-length immunoglobulins and antibody fragments that bind to the same antigens. The antibodies can be, e.g., a monoclonal, polyclonal, chimeric, humanized, or single chain antibody. As used herein, the terms “antigen binding fragment,” “fragment,” and “antibody fragment” are used interchangeably to refer to any fragment that comprises a portion of a full-length antibody, generally at least the antigen binding portion or the variable region thereof. Examples of antibody fragments include, but are not limited to, diabodies, single-chain antibody molecules, multi-specific antibodies, Fab, Fab′, F(ab′)2, Fv or scFv.

[0015] The phrase “therapeutically effective” is intended to qualify the amount of active ingredients used in the treatment of a disease or disorder or on the effecting of a clinical endpoint.

[0016] The term “therapeutically acceptable” refers to those compounds (or salts, prodrugs, tautomers, zwitterionic forms, etc.) which are suitable for use in contact with the tissues of patients without undue toxicity, irritation, and allergic response, are commensurate with a reasonable benefit/risk ratio, and are effective for their intended use.

[0017] The terms “treating,” “treatment,” and the like, as used herein, mean ameliorating a disease, so as to reduce, ameliorate, or eliminate its cause, its progression, its severity, or one or more of its symptoms, or otherwise beneficially alter the disease in a subject. Reference to “treating,” or “treatment” of a patient is intended to include prophylaxis. Treatment may also be preemptive in nature, i.e., it may include prevention of disease in a subject exposed to or at risk for the disease. Prevention of a disease may involve complete protection from disease, for example as in the case of prevention of infection with a pathogen or may involve prevention of disease progression. For example, prevention of a disease may not mean complete foreclosure of any effect related to the diseases at any level, but instead may mean prevention of the symptoms of a disease to a clinically significant or detectable level. Prevention of diseases may also mean prevention of progression of a disease to a later stage of the disease.

[0018] The terms “subject” and “patient” are used interchangeably herein to mean all mammals including humans Examples of subjects include, but are not limited to, humans, monkeys, dogs, cats, horses, cows, goats, sheep, pigs, and rabbits. In one embodiment, the subject or patient is a human.

[0019] In certain embodiments, the cancer treated with the anti-TIGIT antibody molecule, alone or in combination, includes but is not limited to, a solid tumor, a hematological cancer (e.g., leukemia, lymphoma, myeloma), and a metastatic lesion thereof. In one embodiment, the cancer is a solid tumor. Examples of solid tumors include malignancies, e.g., sarcomas and carcinomas (e.g., adenocarcinomas), of the various organ systems, such as those affecting lung, breast, lymphoid, gastrointestinal or colorectal, genitals and genitourinary tract (e.g., renal, urothelial, bladder cells), pharynx, CNS (e.g., brain, neural or glial cells), skin (e.g., melanoma), head and neck (e.g., head and neck squamous cell carcinoma (HNCC)), and pancreas. For example, melanoma, colon cancers, gastric cancer, rectal cancer, renal-cell carcinoma, breast cancer (e.g., a breast cancer that does not express one, two or all of estrogen receptor, progesterone receptor, or Her2/neu, e.g., a triple negative breast cancer), liver cancer, a lung cancer (e.g., a non-small cell lung cancer (NSCLC) (e.g., a NSCLC with squamous and/or non-squamous histology) or small cell lung cancer), prostate cancer, cancer of head or neck (e.g., HPV+ squamous cell carcinoma), cancer of the small intestine and cancer of the esophagus. Examples of hematological cancer include, but is not limited to, leukemia (e.g., a myeloid leukemia, lymphoid leukemia, or chronic lymphocytic leukemia (CLL)), lymphoma (e.g., Hodgkin lymphoma (HL), non-Hodgkin lymphoma (NHL), Diffuse large B-cell lymphoma (DLBCL), T-cell lymphoma, or mantle cell lymphoma (MCL)), and myeloma, e.g., multiple myeloma. The cancer may be at an early, intermediate, late stage or metastatic cancer. For discovering and developing antibody therapeutics to TIGIT generally known in the art, please see U.S. Pat. Application No. 2018/0066055, which is incorporated in its entirety by reference.

[0020] The provided antibodies disclosed herein can be used to treat, prevent and/or diagnose cancerous or malignant disorders (e.g., cancers such as melanoma, e.g., advanced stage melanoma; pancreatic cancer, e.g., advanced pancreatic cancer; solid tumors; breast cancer, e.g., metastatic breast carcinoma; renal cell carcinoma, e.g., advanced or metastatic renal cell carcinoma (MRCC) or clear cell renal cell carcinoma).

[0021] The provided antibodies may be used to diagnose, treat, or monitor TIGIT-expressing cancer and its progression, regression, or stability; to determine whether or not a patient should be treated for cancer; or to determine whether or not a subject is afflicted with TIGIT-expressing cancer and thus may be amenable to treatment with a TIGIT-specific anti-cancer therapeutic. In some embodiments, the antibodies or fragments thereof described herein may be used for various in vitro molecular-biology applications such as, for example, enzyme-linked immunosorbent assays (ELISA), Western blots, immunohistochemistry, immunocytochemistry, flow cytometry and fluorescence-activated cell sorting (FACS), immunoprecipitation, and/or enzyme-linked immunospot assays (ELISPOT). In some embodiments, the antibodies or fragments thereof may be packaged in kits with or without additional reagents known to those of skill in the art for practicing any of the molecular biology techniques disclosed above.

[0022] The disclosure provides the antibodies SCT-Ga001, SCT-Ga002, SCT-Ga003, SCT-Ga004, SCT-Ga005, SCT-Ga006, SCT-Ga007, SCT-Ga008, SCT-Ga009, SCT-Ga010, SCT-Ga011, SCT-Ga012, SCT-Ga013, SCT-Ga014, SCT-Ga015, SCT-Ga016, SCT-Ga017, SCT-Ga018, SCT-Ga019, SCT-Ga020, SCT-Ga021, SCT-Ga022, SCT-Ga023, SCT-Ga024, SCT-Ga025, SCT-Ga026, SCT-Ga027, SCT-Ga028, SCT-Ga029, SCT-Ga030, SCT-Ga031, SCT-Ga032, SCT-Ga033, SCT-Ga034, SCT-Ga035, SCT-Ga036, SCT-Ga037, SCT-Ga038, SCT-Ga039, SCT-Ga040, SCT-Ga041, SCT-Ga042, SCT-Ga043, SCT-Ga044, SCT-Ga045, SCT-Ga046, SCT-Ga047, SCT-Ga048, SCT-Ga049, SCT-Ga050, SCT-Ga051, SCT-Ga052, SCT-Ga053, SCT-Ga054, SCT-Ga055, SCT-Ga056, SCT-Ga057, SCT-Ga058, SCT-Ga059, SCT-Ga060, SCT-Ga061, SCT-Ga062, SCT-Ga063, SCT-Ga064, SCT-Ga065, SCT-Ga066, SCT-Ga067, SCT-Ga068, SCT-Ga069, SCT-Ga070, SCT-Ga071, SCT-Ga072, SCT-Ga073, SCT-Ga074, SCT-Ga075, SCT-Ga076, SCT-Ga077, SCT-Ga078, SCT-Ga079, SCT-Ga080, SCT-Ga081, SCT-Ga082, SCT-Ga083, SCT-Ga084, SCT-Ga085, SCT-Ga086, SCT-Ga087, SCT-Ga088, SCT-Ga089, SCT-Ga090, SCT-Ga091, SCT-Ga092, SCT-Ga093, SCT-Ga094, SCT-Ga095, SCT-Ga096, SCT-Ga097, SCT-Ga098, SCT-Ga099, SCT-Ga100, SCT-Ga101, SCT-Ga102, SCT-Ga103, SCT-Ga104, SCT-Ga105, SCT-Ga106, SCT-Ga107, SCT-Ga108, SCT-Ga109, SCT-Ga110, SCT-Ga111, SCT-Ga112, SCT-Ga113, SCT-Ga114, SCT-Ga115, SCT-Ga116, SCT-Ga117, SCT-Ga118, SCT-Ga119, SCT-Ga120, SCT-Ga121, SCT-Ga122, SCT-Ga123, SCT-Ga124, SCT-Ga125, SCT-Ga126, SCT-Ga127, SCT-Ga128, SCT-Ga129, SCT-Ga130, SCT-Ga131, SCT-Ga132, SCT-Ga133, SCT-Ga134, SCT-Ga135, SCT-Ga136, SCT-Ga137, SCT-Ga138, SCT-Ga139, SCT-Ga140, SCT-Ga141, SCT-Ga142, SCT-Ga143, SCT-Ga144, SCT-Ga145, SCT-Ga146, SCT-Ga147, SCT-Ga148, SCT-Ga149, SCT-Ga150, SCT-Ga151, SCT-Ga152, SCT-Ga153, SCT-Ga154, SCT-Ga155, SCT-Ga156, SCT-Ga157, SCT-Ga158, SCT-Ga159, SCT-Ga160, SCT-Ga161, SCT-Ga162, SCT-Ga163, SCT-Ga164, SCT-Ga165, SCT-Ga166, SCT-Ga167, SCT-Ga168, SCT-Ga169, SCT-Ga170, SCT-Ga171, SCT-Ga172, SCT-Ga173, SCT-Ga174, SCT-Ga175, SCT-Ga176, SCT-Ga177, SCT-Ga178, SCT-Ga179, SCT-Ga180, SCT-Ga181, SCT-Ga182, SCT-Ga183, SCT-Ga184, SCT-Ga185, SCT-Ga186, SCT-Ga187, SCT-Ga188, SCT-Ga189, SCT-Ga190, SCT-Ga191, SCT-Ga192, SCT-Ga193, SCT-Ga194, SCT-Ga195, SCT-Ga196, SCT-Ga197, SCT-Ga198, SCT-Ga199, SCT-Ga200, SCT-Ga201, SCT-Ga202, SCT-Ga203, SCT-Ga204, SCT-Ga205, SCT-Ga206, SCT-Ga207, SCT-Ga208, SCT-Ga209, SCT-Ga210, SCT-Ga211, SCT-Ga212, SCT-Ga213, SCT-Ga214, SCT-Ga215, SCT-Ga216, SCT-Ga217, SCT-Ga218, SCT-Ga219, SCT-Ga220, SCT-Ga221, SCT-Ga222, SCT-Ga223, SCT-Ga224, SCT-Ga225, SCT-Ga226, SCT-Ga227, SCT-Ga228, SCT-Ga229, SCT-Ga230, SCT-Ga231, SCT-Ga232, SCT-Ga233, SCT-Ga234, SCT-Ga235, SCT-Ga236, SCT-Ga237, SCT-Ga238, SCT-Ga239, SCT-Ga240, SCT-Ga241, SCT-Ga242, SCT-Ga243, SCT-Ga244, SCT-Ga245, SCT-Ga246, SCT-Ga247, SCT-Ga248, SCT-Ga249, SCT-Ga250, SCT-Ga251, SCT-Ga252, SCT-Ga253, SCT-Ga254, SCT-Ga255, SCT-Ga256, SCT-Ga257, SCT-Ga258, SCT-Ga259, SCT-Ga260, SCT-Ga261, SCT-Ga262, SCT-Ga263, SCT-Ga264, SCT-Ga265, SCT-Ga266, SCT-Ga267, SCT-Ga268, SCT-Ga269, SCT-Ga270, SCT-Ga271, SCT-Ga272, SCT-Ga273, SCT-Ga274, SCT-Ga275, SCT-Ga276, SCT-Ga277, SCT-Ga278, SCT-Ga279, SCT-Ga280, SCT-Ga281, SCT-Ga282, SCT-Ga283, SCT-Ga284, SCT-Ga285, SCT-Ga286, SCT-Ga287, SCT-Ga288, SCT-Ga289, SCT-Ga290, SCT-Ga291, SCT-Ga292, SCT-Ga293, SCT-Ga294, SCT-Ga295, SCT-Ga296, SCT-Ga297, SCT-Ga298, SCT-Ga299, SCT-Ga300, SCT-Ga301, SCT-Ga302, SCT-Ga303, SCT-Ga304, SCT-Ga305, SCT-Ga306, SCT-Ga307, SCT-Ga308, SCT-Ga309, SCT-Ga310, SCT-Ga311, SCT-Ga312, SCT-Ga313, SCT-Ga314, SCT-Ga315, SCT-Ga316, SCT-Ga317, SCT-Ga318, SCT-Ga319, SCT-Ga320, SCT-Ga321, SCT-Ga322, SCT-Ga323, SCT-Ga324, SCT-Ga325, SCT-Ga326, SCT-Ga327, SCT-Ga328, SCT-Ga329, SCT-Ga330, SCT-Ga331, SCT-Ga332, SCT-Ga333, SCT-Ga334, SCT-Ga335, SCT-Ga336, SCT-Ga337, SCT-Ga338, SCT-Ga339, SCT-Ga340, SCT-Ga341, SCT-Ga342, SCT-Ga343, SCT-Ga344, SCT-Ga345, SCT-Ga346, SCT-Ga347, SCT-Ga348, SCT-Ga349, SCT-Ga350, SCT-Ga351, SCT-Ga352, SCT-Ga353, SCT-Ga354, SCT-Ga355, SCT-Ga356, SCT-Ga357, SCT-Ga358, SCT-Ga359, SCT-Ga360, SCT-Ga361, SCT-Ga362, SCT-Ga363, SCT-Ga364, SCT-Ga365, SCT-Ga366, SCT-Ga367, SCT-Ga368, SCT-Ga369, SCT-Ga370, SCT-Ga371, SCT-Ga372, SCT-Ga373, SCT-Ga374, SCT-Ga375, SCT-Ga376, SCT-Ga377, SCT-Ga378, SCT-Ga379, SCT-Ga380, SCT-Ga381, SCT-Ga382, SCT-Ga383, SCT-Ga384, SCT-Ga385, SCT-Ga386, SCT-Ga387, SCT-Ga388, SCT-Ga389, SCT-Ga390, SCT-Ga391, SCT-Ga392, SCT-Ga393, SCT-Ga394, SCT-Ga395, SCT-Ga396, SCT-Ga397, SCT-Ga398, SCT-Ga399, SCT-Ga400, SCT-Ga401, SCT-Ga402, SCT-Ga403, SCT-Ga404, SCT-Ga405, SCT-Ga406, SCT-Ga407, SCT-Ga408, SCT-Ga409, SCT-Ga410, SCT-Ga411, SCT-Ga412, SCT-Ga413, SCT-Ga414, SCT-Ga415, SCT-Ga416, SCT-Ga417, SCT-Ga418, SCT-Ga419, SCT-Ga420, SCT-Ga421, SCT-Ga422, SCT-Ga423, SCT-Ga424, SCT-Ga425, SCT-Ga426, SCT-Ga427, SCT-Ga428, SCT-Ga429, SCT-Ga430, SCT-Ga431, SCT-Ga432, SCT-Ga433, SCT-Ga434, SCT-Ga435, SCT-Ga436, SCT-Ga437, SCT-Ga438, SCT-Ga439, SCT-Ga440, SCT-Ga441, SCT-Ga442, SCT-Ga443, SCT-Ga444, SCT-Ga445, SCT-Ga446, SCT-Ga447, SCT-Ga448, SCT-Ga449, SCT-Ga450, SCT-Ga451, SCT-Ga452, SCT-Ga453, SCT-Ga454, SCT-Ga455, and SCT-Ga456. Each of these is a murine monoclonal antibody. The disclosure also provides the antibodies SCT-Ga457, SCT-Ga458, SCT-Ga459, SCT-Ga460, SCT-Ga461, SCT-Ga462, SCT-Ga463, SCT-Ga464, SCT-Ga465, SCT-Ga466, SCT-Ga467, SCT-Ga468, SCT-Ga469, SCT-Ga470, SCT-Ga471, SCT-Ga472, SCT-Ga473, SCT-Ga474, SCT-Ga475, SCT-Ga476, SCT-Ga477, SCT-Ga478, SCT-Ga479, SCT-Ga480, SCT-Ga481, SCT-Ga482, SCT-Ga483, SCT-Ga484, SCT-Ga485, SCT-Ga486, SCT-Ga487, SCT-Ga488, SCT-Ga489, SCT-Ga490, SCT-Ga491, SCT-Ga492, SCT-Ga493, SCT-Ga494, SCT-Ga495, SCT-Ga496, SCT-Ga497, and SCT-Ga498. Each of these is a humanized monoclonal antibody.

[0023] Additionally, recombinant anti-TIGIT antibodies, such as chimeric and humanized monoclonal antibodies, comprising both human and non-human portions, which can be made using standard recombinant DNA techniques, are within the scope of the disclosure. Such chimeric and humanized monoclonal antibodies can be produced by recombinant DNA techniques such as, for example, the methods described in U.S. Pat. No. 7,112,421; Better et al. (1988) Science 240:1041-1043; or Liu et al. (1987) Proc. Natl. Acad. Sci. USA 84:3439-3443.

### Antibody Variable Domain Sequence

[0024] The antibodies of the disclosure may comprise the heavy chain variable domain sequences of SEQ ID NO:4, SEQ ID NO:5, SEQ ID NO:6, SEQ ID NO:6, SEQ ID NO:7, SEQ ID NO:7, SEQ ID NO:7, SEQ ID NO:7, SEQ ID NO:7, SEQ ID NO:7, SEQ ID NO:7, SEQ ID NO:8, SEQ ID NO:9, SEQ ID NO:10, SEQ ID NO:11, SEQ ID NO:12, SEQ ID NO:13, SEQ ID NO:14, SEQ ID NO:15, SEQ ID NO:16, SEQ ID NO:17, SEQ ID NO:17, SEQ ID NO:17, SEQ ID NO:18, SEQ ID NO:19, SEQ ID NO:20, SEQ ID NO:20, SEQ ID NO:20, SEQ ID NO:20, SEQ ID NO:21, SEQ ID NO:21, SEQ ID NO:22, SEQ ID NO:23, SEQ ID NO:23, SEQ ID NO:23, SEQ ID NO:24, SEQ ID NO:25, SEQ ID NO:26, SEQ ID NO:27, SEQ ID NO:27, SEQ ID NO:27, SEQ ID NO:27, SEQ ID NO:27, SEQ ID NO:28, SEQ ID NO:29, SEQ ID NO:30, SEQ ID NO:31, SEQ ID NO:32, SEQ ID NO:33, SEQ ID NO:33, SEQ ID NO:34, SEQ ID NO:35, SEQ ID NO:36, SEQ ID NO:36, SEQ ID NO:37, SEQ ID NO:38, SEQ ID NO:39, SEQ ID NO:40, SEQ ID NO:41, SEQ ID NO:42, SEQ ID NO:43, SEQ ID NO:44, SEQ ID NO:45, SEQ ID NO:46, SEQ ID NO:47, SEQ ID NO:48, SEQ ID NO:49, SEQ ID NO:50, SEQ ID NO:51, SEQ ID NO:51, SEQ ID NO:51, SEQ ID NO:52, SEQ ID NO:53, SEQ ID NO:54, SEQ ID NO:55, SEQ ID NO:55, SEQ ID NO:56, SEQ ID NO:57, SEQ ID NO:58, SEQ ID NO:58, SEQ ID NO:59, SEQ ID NO:60, SEQ ID NO:61, SEQ ID NO:62, SEQ ID NO:62, SEQ ID NO:62, SEQ ID NO:62, SEQ ID NO:62, SEQ ID NO:63, SEQ ID NO:64, SEQ ID NO:65, SEQ ID NO:66, SEQ ID NO:67, SEQ ID NO:67, SEQ ID NO:67, SEQ ID NO:68, SEQ ID NO:69, SEQ ID NO:70, SEQ ID NO:71, SEQ ID NO:72, SEQ ID NO:73, SEQ ID NO:74, SEQ ID NO:75, SEQ ID NO:75, SEQ ID NO:76, SEQ ID NO:77, SEQ ID NO:78, SEQ ID NO:79, SEQ ID NO:79, SEQ ID NO:80, SEQ ID NO:81, SEQ ID NO:82, SEQ ID NO:83, SEQ ID NO:84, SEQ ID NO:84, SEQ ID NO:84, SEQ ID NO:84, SEQ ID NO:84, SEQ ID NO:85, SEQ ID NO:86, SEQ ID NO:87, SEQ ID NO:88, SEQ ID NO:89, SEQ ID NO:90, SEQ ID NO:91, SEQ ID NO:92, SEQ ID NO:93, SEQ ID NO:93, SEQ ID NO:94, SEQ ID NO:95, SEQ ID NO:96, SEQ ID NO:97, SEQ ID NO:98, SEQ ID NO:99, SEQ ID NO:100, SEQ ID NO:101, SEQ ID NO:102, SEQ ID NO:102, SEQ ID NO:103, SEQ ID NO:104, SEQ ID NO:105, SEQ ID NO:106, SEQ ID NO:107, SEQ ID NO:108, SEQ ID NO:109, SEQ ID NO:110, SEQ ID NO:111, SEQ ID NO:112, SEQ ID NO:113, SEQ ID NO:114, SEQ ID NO:115, SEQ ID NO:116, SEQ ID NO:117, SEQ ID NO:118, SEQ ID NO:119, SEQ ID NO:120, SEQ ID NO:121, SEQ ID NO:122, SEQ ID NO:123, SEQ ID NO:124, SEQ ID NO:125, SEQ ID NO:126, SEQ ID NO:127, SEQ ID NO:128, SEQ ID NO:129, SEQ ID NO:130, SEQ ID NO:131, SEQ ID NO:132, SEQ ID NO:133, SEQ ID NO:134, SEQ ID NO:135, SEQ ID NO:136, SEQ ID NO:137, SEQ ID NO:138, SEQ ID NO:139, SEQ ID NO:140, SEQ ID NO:140, SEQ ID NO:141, SEQ ID NO:142, SEQ ID NO:143, SEQ ID NO:144, SEQ ID NO:145, SEQ ID NO:146, SEQ ID NO:147, SEQ ID NO:148, SEQ ID NO:149, SEQ ID NO:150, SEQ ID NO:151, SEQ ID NO:151, SEQ ID NO:152, SEQ ID NO:153, SEQ ID NO:154, SEQ ID NO:155, SEQ ID NO:156, SEQ ID NO:157, SEQ ID NO:158, SEQ ID NO:159, SEQ ID NO:160, SEQ ID NO:161, SEQ ID NO:162, SEQ ID NO:163, SEQ ID NO:163, SEQ ID NO:164, SEQ ID NO:164, SEQ ID NO:165, SEQ ID NO:166, SEQ ID NO:167, SEQ ID NO:168, SEQ ID NO:169, SEQ ID NO:170, SEQ ID NO:170, SEQ ID NO:171, SEQ ID NO:171, SEQ ID NO:171, SEQ ID NO:172, SEQ ID NO:173, SEQ ID NO:173, SEQ ID NO:173, SEQ ID NO:174, SEQ ID NO:175, SEQ ID NO:176, SEQ ID NO:176, SEQ ID NO:177, SEQ ID NO:177, SEQ ID NO:177, SEQ ID NO:177, SEQ ID NO:177, SEQ ID NO:178, SEQ ID NO:179, SEQ ID NO:180, SEQ ID NO:180, SEQ ID NO:181, SEQ ID NO:181, SEQ ID NO:182, SEQ ID NO:182, SEQ ID NO:182, SEQ ID NO:183, SEQ ID NO:183, SEQ ID NO:183, SEQ ID NO:184, SEQ ID NO:185, SEQ ID NO:186, SEQ ID NO:187, SEQ ID NO:188, SEQ ID NO:189, SEQ ID NO:189, SEQ ID NO:189, SEQ ID NO:190, SEQ ID NO:191, SEQ ID NO:192, SEQ ID NO:192, SEQ ID NO:193, SEQ ID NO:194, SEQ ID NO:195, SEQ ID NO:196, SEQ ID NO:197, SEQ ID NO:198, SEQ ID NO:198, SEQ ID NO:199, SEQ ID NO:200, SEQ ID NO:201, SEQ ID NO:201, SEQ ID NO:201, SEQ ID NO:201, SEQ ID NO:201, SEQ ID NO:201, SEQ ID NO:202, SEQ ID NO:203, SEQ ID NO:204, SEQ ID NO:205, SEQ ID NO:206, SEQ ID NO:207, SEQ ID NO:208, SEQ ID NO:209, SEQ ID NO:210, SEQ ID NO:210, SEQ ID NO:211, SEQ ID NO:212, SEQ ID NO:213, SEQ ID NO:214, SEQ ID NO:215, SEQ ID NO:216, SEQ ID NO:217, SEQ ID NO:218, SEQ ID NO:219, SEQ ID NO:220, SEQ ID NO:220, SEQ ID NO:221, SEQ ID NO:222, SEQ ID NO:223, SEQ ID NO:224, SEQ ID NO:224, SEQ ID NO:225, SEQ ID NO:226, SEQ ID NO:227, SEQ ID NO:228, SEQ ID NO:229, SEQ ID NO:230, SEQ ID NO:230, SEQ ID NO:231, SEQ ID NO:232, SEQ ID NO:233, SEQ ID NO:234, SEQ ID NO:235, SEQ ID NO:236, SEQ ID NO:237, SEQ ID NO:238, SEQ ID NO:238, SEQ ID NO:239, SEQ ID NO:240, SEQ ID NO:241, SEQ ID NO:242, SEQ ID NO:243, SEQ ID NO:244, SEQ ID NO:245, SEQ ID NO:246, SEQ ID NO:246, SEQ ID NO:247, SEQ ID NO:248, SEQ ID NO:249, SEQ ID NO:250, SEQ ID NO:251, SEQ ID NO:252, SEQ ID NO:253, SEQ ID NO:254, SEQ ID NO:255, SEQ ID NO:256, SEQ ID NO:257, SEQ ID NO:257, SEQ ID NO:258, SEQ ID NO:259, SEQ ID NO:260, SEQ ID NO:261, SEQ ID NO:262, SEQ ID NO:263, SEQ ID NO:264, SEQ ID NO:265, SEQ ID NO:266, SEQ ID NO:267, SEQ ID NO:267, SEQ ID NO:268, SEQ ID NO:269, SEQ ID NO:270, SEQ ID NO:271, SEQ ID NO:272, SEQ ID NO:273, SEQ ID NO:274, SEQ ID NO:275, SEQ ID NO:276, SEQ ID NO:277, SEQ ID NO:278, SEQ ID NO:279, SEQ ID NO:280, SEQ ID NO:281, SEQ ID NO:282, SEQ ID NO:283, SEQ ID NO:284, SEQ ID NO:285, SEQ ID NO:286, SEQ ID NO:287, SEQ ID NO:288, SEQ ID NO:289, SEQ ID NO:290, SEQ ID NO:291, SEQ ID NO:292, SEQ ID NO:293, SEQ ID NO:294, SEQ ID NO:295, SEQ ID NO:296, SEQ ID NO:297, SEQ ID NO:298, SEQ ID NO:299, SEQ ID NO:300, SEQ ID NO:301, SEQ ID NO:302, SEQ ID NO:303, SEQ ID NO:304, SEQ ID NO:305, SEQ ID NO:306, SEQ ID NO:307, SEQ ID NO:308, SEQ ID NO:309, SEQ ID NO:310, SEQ ID NO:311, SEQ ID NO:311, SEQ ID NO:312, SEQ ID NO:313, SEQ ID NO:313, SEQ ID NO:314, SEQ ID NO:315, SEQ ID NO:315, SEQ ID NO:316, SEQ ID NO:317, SEQ ID NO:318, SEQ ID NO:319, SEQ ID NO:319, SEQ ID NO:320, SEQ ID NO:321, SEQ ID NO:322, SEQ ID NO:323, SEQ ID NO:324, SEQ ID NO:325, SEQ ID NO:326, SEQ ID NO:327, SEQ ID NO:328, SEQ ID NO:329, SEQ ID NO:330, SEQ ID NO:331, SEQ ID NO:332, SEQ ID NO:333, SEQ ID NO:334, SEQ ID NO:335, SEQ ID NO:336, SEQ ID NO:337, SEQ ID NO:338, SEQ ID NO:339, SEQ ID NO:340, SEQ ID NO:341, SEQ ID NO:342, SEQ ID NO:343, SEQ ID NO:344, SEQ ID NO:345, SEQ ID NO:346, SEQ ID NO:347, SEQ ID NO:348, SEQ ID NO:349, SEQ ID NO:350, SEQ ID NO:351, SEQ ID NO:352, SEQ ID NO:353, SEQ ID NO:354, SEQ ID NO:355, SEQ ID NO:356, SEQ ID NO:357, SEQ ID NO:358, SEQ ID NO:359, SEQ ID NO:360, SEQ ID NO:361, SEQ ID NO:362, SEQ ID NO:363, SEQ ID NO:364, SEQ ID NO:365, SEQ ID NO:366, SEQ ID NO:367, SEQ ID NO:368, SEQ ID NO:369, SEQ ID NO:370, SEQ ID NO:371, SEQ ID NO:372, SEQ ID NO:373, SEQ ID NO:374, SEQ ID NO:375, SEQ ID NO:376, SEQ ID NO:377, SEQ ID NO:378, SEQ ID NO:379, SEQ ID NO:1366, SEQ ID NO:1369, SEQ ID NO:1372, SEQ ID NO:1373, SEQ ID NO:1376, SEQ ID NO:1377, SEQ ID NO:1380, SEQ ID NO:1381, SEQ ID NO:1384, SEQ ID NO:1385, SEQ ID NO:1388, SEQ ID NO:1389, SEQ ID NO:1391, SEQ ID NO:1394, SEQ ID NO:1395, SEQ ID NO:1396, SEQ ID NO:1397, SEQ ID NO:1398, SEQ ID NO:1400, SEQ ID NO:1401, SEQ ID NO:1402, SEQ ID NO:1404, or SEQ ID NO:1405. The heavy chain variable domain sequences may consist essentially of SEQ ID NO:4, SEQ ID NO:5, SEQ ID NO:6, SEQ ID NO:6, SEQ ID NO:7, SEQ ID NO:7, SEQ ID NO:7, SEQ ID NO:7, SEQ ID NO:7, SEQ ID NO:7, SEQ ID NO:7, SEQ ID NO:8, SEQ ID NO:9, SEQ ID NO:10, SEQ ID NO:11, SEQ ID NO:12, SEQ ID NO:13, SEQ ID NO:14, SEQ ID NO:15, SEQ ID NO:16, SEQ ID NO:17, SEQ ID NO:17, SEQ ID NO:17, SEQ ID NO:18, SEQ ID NO:19, SEQ ID NO:20, SEQ ID NO:20, SEQ ID NO:20, SEQ ID NO:20, SEQ ID NO:21, SEQ ID NO:21, SEQ ID NO:22, SEQ ID NO:23, SEQ ID NO:23, SEQ ID NO:23, SEQ ID NO:24, SEQ ID NO:25, SEQ ID NO:26, SEQ ID NO:27, SEQ ID NO:27, SEQ ID NO:27, SEQ ID NO:27, SEQ ID NO:27, SEQ ID NO:28, SEQ ID NO:29, SEQ ID NO:30, SEQ ID NO:31, SEQ ID NO:32, SEQ ID NO:33, SEQ ID NO:33, SEQ ID NO:34, SEQ ID NO:35, SEQ ID NO:36, SEQ ID NO:36, SEQ ID NO:37, SEQ ID NO:38, SEQ ID NO:39, SEQ ID NO:40, SEQ ID NO:41, SEQ ID NO:42, SEQ ID NO:43, SEQ ID NO:44, SEQ ID NO:45, SEQ ID NO:46, SEQ ID NO:47, SEQ ID NO:48, SEQ ID NO:49, SEQ ID NO:50, SEQ ID NO:51, SEQ ID NO:51, SEQ ID NO:51, SEQ ID NO:52, SEQ ID NO:53, SEQ ID NO:54, SEQ ID NO:55, SEQ ID NO:55, SEQ ID NO:56, SEQ ID NO:57, SEQ ID NO:58, SEQ ID NO:58, SEQ ID NO:59, SEQ ID NO:60, SEQ ID NO:61, SEQ ID NO:62, SEQ ID NO:62, SEQ ID NO:62, SEQ ID NO:62, SEQ ID NO:62, SEQ ID NO:63, SEQ ID NO:64, SEQ ID NO:65, SEQ ID NO:66, SEQ ID NO:67, SEQ ID NO:67, SEQ ID NO:67, SEQ ID NO:68, SEQ ID NO:69, SEQ ID NO:70, SEQ ID NO:71, SEQ ID NO:72, SEQ ID NO:73, SEQ ID NO:74, SEQ ID NO:75, SEQ ID NO:75, SEQ ID NO:76, SEQ ID NO:77, SEQ ID NO:78, SEQ ID NO:79, SEQ ID NO:79, SEQ ID NO:80, SEQ ID NO:81, SEQ ID NO:82, SEQ ID NO:83, SEQ ID NO:84, SEQ ID NO:84, SEQ ID NO:84, SEQ ID NO:84, SEQ ID NO:84, SEQ ID NO:85, SEQ ID NO:86, SEQ ID NO:87, SEQ ID NO:88, SEQ ID NO:89, SEQ ID NO:90, SEQ ID NO:91, SEQ ID NO:92, SEQ ID NO:93, SEQ ID NO:93, SEQ ID NO:94, SEQ ID NO:95, SEQ ID NO:96, SEQ ID NO:97, SEQ ID NO:98, SEQ ID NO:99, SEQ ID NO:100, SEQ ID NO:101, SEQ ID NO:102, SEQ ID NO:102, SEQ ID NO:103, SEQ ID NO:104, SEQ ID NO:105, SEQ ID NO:106, SEQ ID NO:107, SEQ ID NO:108, SEQ ID NO:109, SEQ ID NO:110, SEQ ID NO:111, SEQ ID NO:112, SEQ ID NO:113, SEQ ID NO:114, SEQ ID NO:115, SEQ ID NO:116, SEQ ID NO:117, SEQ ID NO:118, SEQ ID NO:119, SEQ ID NO:120, SEQ ID NO:121, SEQ ID NO:122, SEQ ID NO:123, SEQ ID NO:124, SEQ ID NO:125, SEQ ID NO:126, SEQ ID NO:127, SEQ ID NO:128, SEQ ID NO:129, SEQ ID NO:130, SEQ ID NO:131, SEQ ID NO:132, SEQ ID NO:133, SEQ ID NO:134, SEQ ID NO:135, SEQ ID NO:136, SEQ ID NO:137, SEQ ID NO:138, SEQ ID NO:139, SEQ ID NO:140, SEQ ID NO:140, SEQ ID NO:141, SEQ ID NO:142, SEQ ID NO:143, SEQ ID NO:144, SEQ ID NO:145, SEQ ID NO:146, SEQ ID NO:147, SEQ ID NO:148, SEQ ID NO:149, SEQ ID NO:150, SEQ ID NO:151, SEQ ID NO:151, SEQ ID NO:152, SEQ ID NO:153, SEQ ID NO:154, SEQ ID NO:155, SEQ ID NO:156, SEQ ID NO:157, SEQ ID NO:158, SEQ ID NO:159, SEQ ID NO:160, SEQ ID NO:161, SEQ ID NO:162, SEQ ID NO:163, SEQ ID NO:163, SEQ ID NO:164, SEQ ID NO:164, SEQ ID NO:165, SEQ ID NO:166, SEQ ID NO:167, SEQ ID NO:168, SEQ ID NO:169, SEQ ID NO:170, SEQ ID NO:170, SEQ ID NO:171, SEQ ID NO:171, SEQ ID NO:171, SEQ ID NO:172, SEQ ID NO:173, SEQ ID NO:173, SEQ ID NO:173, SEQ ID NO:174, SEQ ID NO:175, SEQ ID NO:176, SEQ ID NO:176, SEQ ID NO:177, SEQ ID NO:177, SEQ ID NO:177, SEQ ID NO:177, SEQ ID NO:177, SEQ ID NO:178, SEQ ID NO:179, SEQ ID NO:180, SEQ ID NO:180, SEQ ID NO:181, SEQ ID NO:181, SEQ ID NO:182, SEQ ID NO:182, SEQ ID NO:182, SEQ ID NO:183, SEQ ID NO:183, SEQ ID NO:183, SEQ ID NO:184, SEQ ID NO:185, SEQ ID NO:186, SEQ ID NO:187, SEQ ID NO:188, SEQ ID NO:189, SEQ ID NO:189, SEQ ID NO:189, SEQ ID NO:190, SEQ ID NO:191, SEQ ID NO:192, SEQ ID NO:192, SEQ ID NO:193, SEQ ID NO:194, SEQ ID NO:195, SEQ ID NO:196, SEQ ID NO:197, SEQ ID NO:198, SEQ ID NO:198, SEQ ID NO:199, SEQ ID NO:200, SEQ ID NO:201, SEQ ID NO:201, SEQ ID NO:201, SEQ ID NO:201, SEQ ID NO:201, SEQ ID NO:201, SEQ ID NO:202, SEQ ID NO:203, SEQ ID NO:204, SEQ ID NO:205, SEQ ID NO:206, SEQ ID NO:207, SEQ ID NO:208, SEQ ID NO:209, SEQ ID NO:210, SEQ ID NO:210, SEQ ID NO:211, SEQ ID NO:212, SEQ ID NO:213, SEQ ID NO:214, SEQ ID NO:215, SEQ ID NO:216, SEQ ID NO:217, SEQ ID NO:218, SEQ ID NO:219, SEQ ID NO:220, SEQ ID NO:220, SEQ ID NO:221, SEQ ID NO:222, SEQ ID NO:223, SEQ ID NO:224, SEQ ID NO:224, SEQ ID NO:225, SEQ ID NO:226, SEQ ID NO:227, SEQ ID NO:228, SEQ ID NO:229, SEQ ID NO:230, SEQ ID NO:230, SEQ ID NO:231, SEQ ID NO:232, SEQ ID NO:233, SEQ ID NO:234, SEQ ID NO:235, SEQ ID NO:236, SEQ ID NO:237, SEQ ID NO:238, SEQ ID NO:238, SEQ ID NO:239, SEQ ID NO:240, SEQ ID NO:241, SEQ ID NO:242, SEQ ID NO:243, SEQ ID NO:244, SEQ ID NO:245, SEQ ID NO:246, SEQ ID NO:246, SEQ ID NO:247, SEQ ID NO:248, SEQ ID NO:249, SEQ ID NO:250, SEQ ID NO:251, SEQ ID NO:252, SEQ ID NO:253, SEQ ID NO:254, SEQ ID NO:255, SEQ ID NO:256, SEQ ID NO:257, SEQ ID NO:257, SEQ ID NO:258, SEQ ID NO:259, SEQ ID NO:260, SEQ ID NO:261, SEQ ID NO:262, SEQ ID NO:263, SEQ ID NO:264, SEQ ID NO:265, SEQ ID NO:266, SEQ ID NO:267, SEQ ID NO:267, SEQ ID NO:268, SEQ ID NO:269, SEQ ID NO:270, SEQ ID NO:271, SEQ ID NO:272, SEQ ID NO:273, SEQ ID NO:274, SEQ ID NO:275, SEQ ID NO:276, SEQ ID NO:277, SEQ ID NO:278, SEQ ID NO:279, SEQ ID NO:280, SEQ ID NO:281, SEQ ID NO:282, SEQ ID NO:283, SEQ ID NO:284, SEQ ID NO:285, SEQ ID NO:286, SEQ ID NO:287, SEQ ID NO:288, SEQ ID NO:289, SEQ ID NO:290, SEQ ID NO:291, SEQ ID NO:292, SEQ ID NO:293, SEQ ID NO:294, SEQ ID NO:295, SEQ ID NO:296, SEQ ID NO:297, SEQ ID NO:298, SEQ ID NO:299, SEQ ID NO:300, SEQ ID NO:301, SEQ ID NO:302, SEQ ID NO:303, SEQ ID NO:304, SEQ ID NO:305, SEQ ID NO:306, SEQ ID NO:307, SEQ ID NO:308, SEQ ID NO:309, SEQ ID NO:310, SEQ ID NO:311, SEQ ID NO:311, SEQ ID NO:312, SEQ ID NO:313, SEQ ID NO:313, SEQ ID NO:314, SEQ ID NO:315, SEQ ID NO:315, SEQ ID NO:316, SEQ ID NO:317, SEQ ID NO:318, SEQ ID NO:319, SEQ ID NO:319, SEQ ID NO:320, SEQ ID NO:321, SEQ ID NO:322, SEQ ID NO:323, SEQ ID NO:324, SEQ ID NO:325, SEQ ID NO:326, SEQ ID NO:327, SEQ ID NO:328, SEQ ID NO:329, SEQ ID NO:330, SEQ ID NO:331, SEQ ID NO:332, SEQ ID NO:333, SEQ ID NO:334, SEQ ID NO:335, SEQ ID NO:336, SEQ ID NO:337, SEQ ID NO:338, SEQ ID NO:339, SEQ ID NO:340, SEQ ID NO:341, SEQ ID NO:342, SEQ ID NO:343, SEQ ID NO:344, SEQ ID NO:345, SEQ ID NO:346, SEQ ID NO:347, SEQ ID NO:348, SEQ ID NO:349, SEQ ID NO:350, SEQ ID NO:351, SEQ ID NO:352, SEQ ID NO:353, SEQ ID NO:354, SEQ ID NO:355, SEQ ID NO:356, SEQ ID NO:357, SEQ ID NO:358, SEQ ID NO:359, SEQ ID NO:360, SEQ ID NO:361, SEQ ID NO:362, SEQ ID NO:363, SEQ ID NO:364, SEQ ID NO:365, SEQ ID NO:366, SEQ ID NO:367, SEQ ID NO:368, SEQ ID NO:369, SEQ ID NO:370, SEQ ID NO:371, SEQ ID NO:372, SEQ ID NO:373, SEQ ID NO:374, SEQ ID NO:375, SEQ ID NO:376, SEQ ID NO:377, SEQ ID NO:378, SEQ ID NO:379, SEQ ID NO:1366, SEQ ID NO:1369, SEQ ID NO:1372, SEQ ID NO:1373, SEQ ID NO:1376, SEQ ID NO:1377, SEQ ID NO:1380, SEQ ID NO:1381, SEQ ID NO:1384, SEQ ID NO:1385, SEQ ID NO:1388, SEQ ID NO:1389, SEQ ID NO:1391, SEQ ID NO:1394, SEQ ID NO:1395, SEQ ID NO:1396, SEQ ID NO:1397, SEQ ID NO:1398, SEQ ID NO:1400, SEQ ID NO:1401, SEQ ID NO:1402, SEQ ID NO:1404, or SEQ ID NO:1405.

[0025] The antibodies of the disclosure may comprise the light chain variable domain sequences of SEQ ID NO:380, SEQ ID NO:380, SEQ ID NO:381, SEQ ID NO:381, SEQ ID NO:381, SEQ ID NO:381, SEQ ID NO:381, SEQ ID NO:381, SEQ ID NO:381, SEQ ID NO:381, SEQ ID NO:381, SEQ ID NO:381, SEQ ID NO:381, SEQ ID NO:381, SEQ ID NO:381, SEQ ID NO:381, SEQ ID NO:381, SEQ ID NO:381, SEQ ID NO:381, SEQ ID NO:381, SEQ ID NO:381, SEQ ID NO:381, SEQ ID NO:381, SEQ ID NO:381, SEQ ID NO:381, SEQ ID NO:381, SEQ ID NO:381, SEQ ID NO:381, SEQ ID NO:381, SEQ ID NO:381, SEQ ID NO:381, SEQ ID NO:381, SEQ ID NO:381, SEQ ID NO:381, SEQ ID NO:381, SEQ ID NO:381, SEQ ID NO:381, SEQ ID NO:381, SEQ ID NO:381, SEQ ID NO:381, SEQ ID NO:381, SEQ ID NO:381, SEQ ID NO:381, SEQ ID NO:381, SEQ ID NO:381, SEQ ID NO:381, SEQ ID NO:381, SEQ ID NO:381, SEQ ID NO:381, SEQ ID NO:381, SEQ ID NO:381, SEQ ID NO:381, SEQ ID NO:381, SEQ ID NO:381, SEQ ID NO:381, SEQ ID NO:381, SEQ ID NO:381, SEQ ID NO:381, SEQ ID NO:381, SEQ ID NO:381, SEQ ID NO:381, SEQ ID NO:381, SEQ ID NO:381, SEQ ID NO:381, SEQ ID NO:382, SEQ ID NO:382, SEQ ID NO:382, SEQ ID NO:382, SEQ ID NO:382, SEQ ID NO:383, SEQ ID NO:384, SEQ ID NO:385, SEQ ID NO:385, SEQ ID NO:385, SEQ ID NO:385, SEQ ID NO:385, SEQ ID NO:385, SEQ ID NO:385, SEQ ID NO:386, SEQ ID NO:387, SEQ ID NO:388, SEQ ID NO:389, SEQ ID NO:389, SEQ ID NO:390, SEQ ID NO:391, SEQ ID NO:392, SEQ ID NO:393, SEQ ID NO:394, SEQ ID NO:395, SEQ ID NO:396, SEQ ID NO:396, SEQ ID NO:397, SEQ ID NO:398, SEQ ID NO:398, SEQ ID NO:398, SEQ ID NO:398, SEQ ID NO:398, SEQ ID NO:398, SEQ ID NO:398, SEQ ID NO:398, SEQ ID NO:399, SEQ ID NO:399, SEQ ID NO:400, SEQ ID NO:401, SEQ ID NO:401, SEQ ID NO:402, SEQ ID NO:403, SEQ ID NO:404, SEQ ID NO:404, SEQ ID NO:405, SEQ ID NO:406, SEQ ID NO:406, SEQ ID NO:406, SEQ ID NO:407, SEQ ID NO:408, SEQ ID NO:409, SEQ ID NO:410, SEQ ID NO:410, SEQ ID NO:411, SEQ ID NO:412, SEQ ID NO:413, SEQ ID NO:414, SEQ ID NO:415, SEQ ID NO:416, SEQ ID NO:417, SEQ ID NO:418, SEQ ID NO:419, SEQ ID NO:420, SEQ ID NO:421, SEQ ID NO:422, SEQ ID NO:423, SEQ ID NO:424, SEQ ID NO:425, SEQ ID NO:426, SEQ ID NO:427, SEQ ID NO:428, SEQ ID NO:429, SEQ ID NO:430, SEQ ID NO:431, SEQ ID NO:432, SEQ ID NO:433, SEQ ID NO:434, SEQ ID NO:435, SEQ ID NO:436, SEQ ID NO:437, SEQ ID NO:438, SEQ ID NO:439, SEQ ID NO:440, SEQ ID NO:441, SEQ ID NO:442, SEQ ID NO:443, SEQ ID NO:444, SEQ ID NO:445, SEQ ID NO:445, SEQ ID NO:446, SEQ ID NO:447, SEQ ID NO:448, SEQ ID NO:449, SEQ ID NO:450, SEQ ID NO:451, SEQ ID NO:451, SEQ ID NO:451, SEQ ID NO:452, SEQ ID NO:453, SEQ ID NO:454, SEQ ID NO:455, SEQ ID NO:456, SEQ ID NO:456, SEQ ID NO:457, SEQ ID NO:458, SEQ ID NO:459, SEQ ID NO:460, SEQ ID NO:461, SEQ ID NO:462, SEQ ID NO:462, SEQ ID NO:463, SEQ ID NO:464, SEQ ID NO:465, SEQ ID NO:466, SEQ ID NO:466, SEQ ID NO:466, SEQ ID NO:466, SEQ ID NO:467, SEQ ID NO:468, SEQ ID NO:469, SEQ ID NO:469, SEQ ID NO:469, SEQ ID NO:469, SEQ ID NO:470, SEQ ID NO:471, SEQ ID NO:472, SEQ ID NO:473, SEQ ID NO:474, SEQ ID NO:474, SEQ ID NO:475, SEQ ID NO:476, SEQ ID NO:477, SEQ ID NO:478, SEQ ID NO:479, SEQ ID NO:479, SEQ ID NO:480, SEQ ID NO:481, SEQ ID NO:482, SEQ ID NO:482, SEQ ID NO:482, SEQ ID NO:482, SEQ ID NO:482, SEQ ID NO:482, SEQ ID NO:482, SEQ ID NO:482, SEQ ID NO:482, SEQ ID NO:483, SEQ ID NO:483, SEQ ID NO:484, SEQ ID NO:485, SEQ ID NO:486, SEQ ID NO:486, SEQ ID NO:487, SEQ ID NO:488, SEQ ID NO:489, SEQ ID NO:490, SEQ ID NO:491, SEQ ID NO:492, SEQ ID NO:493, SEQ ID NO:494, SEQ ID NO:495, SEQ ID NO:496, SEQ ID NO:497, SEQ ID NO:498, SEQ ID NO:499, SEQ ID NO:500, SEQ ID NO:501, SEQ ID NO:502, SEQ ID NO:503, SEQ ID NO:504, SEQ ID NO:505, SEQ ID NO:506, SEQ ID NO:506, SEQ ID NO:507, SEQ ID NO:508, SEQ ID NO:509, SEQ ID NO:510, SEQ ID NO:511, SEQ ID NO:512, SEQ ID NO:512, SEQ ID NO:513, SEQ ID NO:514, SEQ ID NO:515, SEQ ID NO:515, SEQ ID NO:515, SEQ ID NO:516, SEQ ID NO:517, SEQ ID NO:517, SEQ ID NO:518, SEQ ID NO:519, SEQ ID NO:520, SEQ ID NO:521, SEQ ID NO:522, SEQ ID NO:523, SEQ ID NO:524, SEQ ID NO:525, SEQ ID NO:526, SEQ ID NO:527, SEQ ID NO:527, SEQ ID NO:528, SEQ ID NO:529, SEQ ID NO:529, SEQ ID NO:529, SEQ ID NO:530, SEQ ID NO:531, SEQ ID NO:531, SEQ ID NO:531, SEQ ID NO:532, SEQ ID NO:533, SEQ ID NO:534, SEQ ID NO:535, SEQ ID NO:536, SEQ ID NO:537, SEQ ID NO:538, SEQ ID NO:539, SEQ ID NO:540, SEQ ID NO:540, SEQ ID NO:541, SEQ ID NO:542, SEQ ID NO:543, SEQ ID NO:544, SEQ ID NO:545, SEQ ID NO:546, SEQ ID NO:547, SEQ ID NO:548, SEQ ID NO:549, SEQ ID NO:550, SEQ ID NO:551, SEQ ID NO:552, SEQ ID NO:552, SEQ ID NO:552, SEQ ID NO:552, SEQ ID NO:552, SEQ ID NO:552, SEQ ID NO:553, SEQ ID NO:554, SEQ ID NO:555, SEQ ID NO:556, SEQ ID NO:557, SEQ ID NO:558, SEQ ID NO:559, SEQ ID NO:560, SEQ ID NO:561, SEQ ID NO:562, SEQ ID NO:563, SEQ ID NO:564, SEQ ID NO:565, SEQ ID NO:566, SEQ ID NO:567, SEQ ID NO:568, SEQ ID NO:569, SEQ ID NO:570, SEQ ID NO:571, SEQ ID NO:572, SEQ ID NO:572, SEQ ID NO:572, SEQ ID NO:572, SEQ ID NO:572, SEQ ID NO:572, SEQ ID NO:572, SEQ ID NO:573, SEQ ID NO:574, SEQ ID NO:575, SEQ ID NO:576, SEQ ID NO:577, SEQ ID NO:578, SEQ ID NO:579, SEQ ID NO:580, SEQ ID NO:580, SEQ ID NO:581, SEQ ID NO:582, SEQ ID NO:583, SEQ ID NO:584, SEQ ID NO:585, SEQ ID NO:586, SEQ ID NO:587, SEQ ID NO:588, SEQ ID NO:589, SEQ ID NO:590, SEQ ID NO:591, SEQ ID NO:592, SEQ ID NO:593, SEQ ID NO:594, SEQ ID NO:595, SEQ ID NO:596, SEQ ID NO:596, SEQ ID NO:596, SEQ ID NO:596, SEQ ID NO:597, SEQ ID NO:598, SEQ ID NO:599, SEQ ID NO:600, SEQ ID NO:601, SEQ ID NO:602, SEQ ID NO:603, SEQ ID NO:604, SEQ ID NO:605, SEQ ID NO:606, SEQ ID NO:607, SEQ ID NO:608, SEQ ID NO:608, SEQ ID NO:609, SEQ ID NO:610, SEQ ID NO:611, SEQ ID NO:612, SEQ ID NO:612, SEQ ID NO:613, SEQ ID NO:614, SEQ ID NO:615, SEQ ID NO:616, SEQ ID NO:617, SEQ ID NO:618, SEQ ID NO:619, SEQ ID NO:620, SEQ ID NO:621, SEQ ID NO:622, SEQ ID NO:623, SEQ ID NO:624, SEQ ID NO:625, SEQ ID NO:626, SEQ ID NO:627, SEQ ID NO:628, SEQ ID NO:629, SEQ ID NO:630, SEQ ID NO:631, SEQ ID NO:632, SEQ ID NO:633, SEQ ID NO:634, SEQ ID NO:635, SEQ ID NO:636, SEQ ID NO:637, SEQ ID NO:638, SEQ ID NO:639, SEQ ID NO:640, SEQ ID NO:641, SEQ ID NO:642, SEQ ID NO:643, SEQ ID NO:643, SEQ ID NO:643, SEQ ID NO:644, SEQ ID NO:645, SEQ ID NO:645, SEQ ID NO:645, SEQ ID NO:645, SEQ ID NO:645, SEQ ID NO:645, SEQ ID NO:646, SEQ ID NO:647, SEQ ID NO:648, SEQ ID NO:649, SEQ ID NO:650, SEQ ID NO:651, SEQ ID NO:652, SEQ ID NO:652, SEQ ID NO:653, SEQ ID NO:654, SEQ ID NO:655, SEQ ID NO:656, SEQ ID NO:657, SEQ ID NO:658, SEQ ID NO:658, SEQ ID NO:659, SEQ ID NO:660, SEQ ID NO:661, SEQ ID NO:662, SEQ ID NO:663, SEQ ID NO:664, SEQ ID NO:665, SEQ ID NO:666, SEQ ID NO:667, SEQ ID NO:667, SEQ ID NO:668, SEQ ID NO:669, SEQ ID NO:669, SEQ ID NO:670, SEQ ID NO:671, SEQ ID NO:672, SEQ ID NO:673, SEQ ID NO:674, SEQ ID NO:675, SEQ ID NO:676, SEQ ID NO:677, SEQ ID NO:678, SEQ ID NO:679, SEQ ID NO:680, SEQ ID NO:681, SEQ ID NO:682, SEQ ID NO:683, SEQ ID NO:684, SEQ ID NO:685, SEQ ID NO:686, SEQ ID NO:1367, SEQ ID NO:1368, SEQ ID NO:1370, SEQ ID NO:1371, SEQ ID NO:1374, SEQ ID NO:1375, SEQ ID NO:1378, SEQ ID NO:1379, SEQ ID NO:1382, SEQ ID NO:1383, SEQ ID NO:1386, SEQ ID NO:1387, SEQ ID NO:1390, SEQ ID NO:1392, SEQ ID NO:1393, SEQ ID NO:1399, SEQ ID NO:1403, SEQ ID NO:1406, or SEQ ID NO:1407. The light chain variable domain sequences may consist essentially of SEQ ID NO:380, SEQ ID NO:380, SEQ ID NO:381, SEQ ID NO:381, SEQ ID NO:381, SEQ ID NO:381, SEQ ID NO:381, SEQ ID NO:381, SEQ ID NO:381, SEQ ID NO:381, SEQ ID NO:381, SEQ ID NO:381, SEQ ID NO:381, SEQ ID NO:381, SEQ ID NO:381, SEQ ID NO:381, SEQ ID NO:381, SEQ ID NO:381, SEQ ID NO:381, SEQ ID NO:381, SEQ ID NO:381, SEQ ID NO:381, SEQ ID NO:381, SEQ ID NO:381, SEQ ID NO:381, SEQ ID NO:381, SEQ ID NO:381, SEQ ID NO:381, SEQ ID NO:381, SEQ ID NO:381, SEQ ID NO:381, SEQ ID NO:381, SEQ ID NO:381, SEQ ID NO:381, SEQ ID NO:381, SEQ ID NO:381, SEQ ID NO:381, SEQ ID NO:381, SEQ ID NO:381, SEQ ID NO:381, SEQ ID NO:381, SEQ ID NO:381, SEQ ID NO:381, SEQ ID NO:381, SEQ ID NO:381, SEQ ID NO:381, SEQ ID NO:381, SEQ ID NO:381, SEQ ID NO:381, SEQ ID NO:381, SEQ ID NO:381, SEQ ID NO:381, SEQ ID NO:381, SEQ ID NO:381, SEQ ID NO:381, SEQ ID NO:381, SEQ ID NO:381, SEQ ID NO:381, SEQ ID NO:381, SEQ ID NO:381, SEQ ID NO:381, SEQ ID NO:381, SEQ ID NO:381, SEQ ID NO:381, SEQ ID NO:382, SEQ ID NO:382, SEQ ID NO:382, SEQ ID NO:382, SEQ ID NO:382, SEQ ID NO:383, SEQ ID NO:384, SEQ ID NO:385, SEQ ID NO:385, SEQ ID NO:385, SEQ ID NO:385, SEQ ID NO:385, SEQ ID NO:385, SEQ ID NO:385, SEQ ID NO:386, SEQ ID NO:387, SEQ ID NO:388, SEQ ID NO:389, SEQ ID NO:389, SEQ ID NO:390, SEQ ID NO:391, SEQ ID NO:392, SEQ ID NO:393, SEQ ID NO:394, SEQ ID NO:395, SEQ ID NO:396, SEQ ID NO:396, SEQ ID NO:397, SEQ ID NO:398, SEQ ID NO:398, SEQ ID NO:398, SEQ ID NO:398, SEQ ID NO:398, SEQ ID NO:398, SEQ ID NO:398, SEQ ID NO:398, SEQ ID NO:399, SEQ ID NO:399, SEQ ID NO:400, SEQ ID NO:401, SEQ ID NO:401, SEQ ID NO:402, SEQ ID NO:403, SEQ ID NO:404, SEQ ID NO:404, SEQ ID NO:405, SEQ ID NO:406, SEQ ID NO:406, SEQ ID NO:406, SEQ ID NO:407, SEQ ID NO:408, SEQ ID NO:409, SEQ ID NO:410, SEQ ID NO:410, SEQ ID NO:411, SEQ ID NO:412, SEQ ID NO:413, SEQ ID NO:414, SEQ ID NO:415, SEQ ID NO:416, SEQ ID NO:417, SEQ ID NO:418, SEQ ID NO:419, SEQ ID NO:420, SEQ ID NO:421, SEQ ID NO:422, SEQ ID NO:423, SEQ ID NO:424, SEQ ID NO:425, SEQ ID NO:426, SEQ ID NO:427, SEQ ID NO:428, SEQ ID NO:429, SEQ ID NO:430, SEQ ID NO:431, SEQ ID NO:432, SEQ ID NO:433, SEQ ID NO:434, SEQ ID NO:435, SEQ ID NO:436, SEQ ID NO:437, SEQ ID NO:438, SEQ ID NO:439, SEQ ID NO:440, SEQ ID NO:441, SEQ ID NO:442, SEQ ID NO:443, SEQ ID NO:444, SEQ ID NO:445, SEQ ID NO:445, SEQ ID NO:446, SEQ ID NO:447, SEQ ID NO:448, SEQ ID NO:449, SEQ ID NO:450, SEQ ID NO:451, SEQ ID NO:451, SEQ ID NO:451, SEQ ID NO:452, SEQ ID NO:453, SEQ ID NO:454, SEQ ID NO:455, SEQ ID NO:456, SEQ ID NO:456, SEQ ID NO:457, SEQ ID NO:458, SEQ ID NO:459, SEQ ID NO:460, SEQ ID NO:461, SEQ ID NO:462, SEQ ID NO:462, SEQ ID NO:463, SEQ ID NO:464, SEQ ID NO:465, SEQ ID NO:466, SEQ ID NO:466, SEQ ID NO:466, SEQ ID NO:466, SEQ ID NO:467, SEQ ID NO:468, SEQ ID NO:469, SEQ ID NO:469, SEQ ID NO:469, SEQ ID NO:469, SEQ ID NO:470, SEQ ID NO:471, SEQ ID NO:472, SEQ ID NO:473, SEQ ID NO:474, SEQ ID NO:474, SEQ ID NO:475, SEQ ID NO:476, SEQ ID NO:477, SEQ ID NO:478, SEQ ID NO:479, SEQ ID NO:479, SEQ ID NO:480, SEQ ID NO:481, SEQ ID NO:482, SEQ ID NO:482, SEQ ID NO:482, SEQ ID NO:482, SEQ ID NO:482, SEQ ID NO:482, SEQ ID NO:482, SEQ ID NO:482, SEQ ID NO:482, SEQ ID NO:483, SEQ ID NO:483, SEQ ID NO:484, SEQ ID NO:485, SEQ ID NO:486, SEQ ID NO:486, SEQ ID NO:487, SEQ ID NO:488, SEQ ID NO:489, SEQ ID NO:490, SEQ ID NO:491, SEQ ID NO:492, SEQ ID NO:493, SEQ ID NO:494, SEQ ID NO:495, SEQ ID NO:496, SEQ ID NO:497, SEQ ID NO:498, SEQ ID NO:499, SEQ ID NO:500, SEQ ID NO:501, SEQ ID NO:502, SEQ ID NO:503, SEQ ID NO:504, SEQ ID NO:505, SEQ ID NO:506, SEQ ID NO:506, SEQ ID NO:507, SEQ ID NO:508, SEQ ID NO:509, SEQ ID NO:510, SEQ ID NO:511, SEQ ID NO:512, SEQ ID NO:512, SEQ ID NO:513, SEQ ID NO:514, SEQ ID NO:515, SEQ ID NO:515, SEQ ID NO:515, SEQ ID NO:516, SEQ ID NO:517, SEQ ID NO:517, SEQ ID NO:518, SEQ ID NO:519, SEQ ID NO:520, SEQ ID NO:521, SEQ ID NO:522, SEQ ID NO:523, SEQ ID NO:524, SEQ ID NO:525, SEQ ID NO:526, SEQ ID NO:527, SEQ ID NO:527, SEQ ID NO:528, SEQ ID NO:529, SEQ ID NO:529, SEQ ID NO:529, SEQ ID NO:530, SEQ ID NO:531, SEQ ID NO:531, SEQ ID NO:531, SEQ ID NO:532, SEQ ID NO:533, SEQ ID NO:534, SEQ ID NO:535, SEQ ID NO:536, SEQ ID NO:537, SEQ ID NO:538, SEQ ID NO:539, SEQ ID NO:540, SEQ ID NO:540, SEQ ID NO:541, SEQ ID NO:542, SEQ ID NO:543, SEQ ID NO:544, SEQ ID NO:545, SEQ ID NO:546, SEQ ID NO:547, SEQ ID NO:548, SEQ ID NO:549, SEQ ID NO:550, SEQ ID NO:551, SEQ ID NO:552, SEQ ID NO:552, SEQ ID NO:552, SEQ ID NO:552, SEQ ID NO:552, SEQ ID NO:552, SEQ ID NO:553, SEQ ID NO:554, SEQ ID NO:555, SEQ ID NO:556, SEQ ID NO:557, SEQ ID NO:558, SEQ ID NO:559, SEQ ID NO:560, SEQ ID NO:561, SEQ ID NO:562, SEQ ID NO:563, SEQ ID NO:564, SEQ ID NO:565, SEQ ID NO:566, SEQ ID NO:567, SEQ ID NO:568, SEQ ID NO:569, SEQ ID NO:570, SEQ ID NO:571, SEQ ID NO:572, SEQ ID NO:572, SEQ ID NO:572, SEQ ID NO:572, SEQ ID NO:572, SEQ ID NO:572, SEQ ID NO:572, SEQ ID NO:573, SEQ ID NO:574, SEQ ID NO:575, SEQ ID NO:576, SEQ ID NO:577, SEQ ID NO:578, SEQ ID NO:579, SEQ ID NO:580, SEQ ID NO:580, SEQ ID NO:581, SEQ ID NO:582, SEQ ID NO:583, SEQ ID NO:584, SEQ ID NO:585, SEQ ID NO:586, SEQ ID NO:587, SEQ ID NO:588, SEQ ID NO:589, SEQ ID NO:590, SEQ ID NO:591, SEQ ID NO:592, SEQ ID NO:593, SEQ ID NO:594, SEQ ID NO:595, SEQ ID NO:596, SEQ ID NO:596, SEQ ID NO:596, SEQ ID NO:596, SEQ ID NO:597, SEQ ID NO:598, SEQ ID NO:599, SEQ ID NO:600, SEQ ID NO:601, SEQ ID NO:602, SEQ ID NO:603, SEQ ID NO:604, SEQ ID NO:605, SEQ ID NO:606, SEQ ID NO:607, SEQ ID NO:608, SEQ ID NO:608, SEQ ID NO:609, SEQ ID NO:610, SEQ ID NO:611, SEQ ID NO:612, SEQ ID NO:612, SEQ ID NO:613, SEQ ID NO:614, SEQ ID NO:615, SEQ ID NO:616, SEQ ID NO:617, SEQ ID NO:618, SEQ ID NO:619, SEQ ID NO:620, SEQ ID NO:621, SEQ ID NO:622, SEQ ID NO:623, SEQ ID NO:624, SEQ ID NO:625, SEQ ID NO:626, SEQ ID NO:627, SEQ ID NO:628, SEQ ID NO:629, SEQ ID NO:630, SEQ ID NO:631, SEQ ID NO:632, SEQ ID NO:633, SEQ ID NO:634, SEQ ID NO:635, SEQ ID NO:636, SEQ ID NO:637, SEQ ID NO:638, SEQ ID NO:639, SEQ ID NO:640, SEQ ID NO:641, SEQ ID NO:642, SEQ ID NO:643, SEQ ID NO:643, SEQ ID NO:643, SEQ ID NO:644, SEQ ID NO:645, SEQ ID NO:645, SEQ ID NO:645, SEQ ID NO:645, SEQ ID NO:645, SEQ ID NO:645, SEQ ID NO:646, SEQ ID NO:647, SEQ ID NO:648, SEQ ID NO:649, SEQ ID NO:650, SEQ ID NO:651, SEQ ID NO:652, SEQ ID NO:652, SEQ ID NO:653, SEQ ID NO:654, SEQ ID NO:655, SEQ ID NO:656, SEQ ID NO:657, SEQ ID NO:658, SEQ ID NO:658, SEQ ID NO:659, SEQ ID NO:660, SEQ ID NO:661, SEQ ID NO:662, SEQ ID NO:663, SEQ ID NO:664, SEQ ID NO:665, SEQ ID NO:666, SEQ ID NO:667, SEQ ID NO:667, SEQ ID NO:668, SEQ ID NO:669, SEQ ID NO:669, SEQ ID NO:670, SEQ ID NO:671, SEQ ID NO:672, SEQ ID NO:673, SEQ ID NO:674, SEQ ID NO:675, SEQ ID NO:676, SEQ ID NO:677, SEQ ID NO:678, SEQ ID NO:679, SEQ ID NO:680, SEQ ID NO:681, SEQ ID NO:682, SEQ ID NO:683, SEQ ID NO:684, SEQ ID NO:685, SEQ ID NO:686, SEQ ID NO:1367, SEQ ID NO:1368, SEQ ID NO:1370, SEQ ID NO:1371, SEQ ID NO:1374, SEQ ID NO:1375, SEQ ID NO:1378, SEQ ID NO:1379, SEQ ID NO:1382, SEQ ID NO:1383, SEQ ID NO:1386, SEQ ID NO:1387, SEQ ID NO:1390, SEQ ID NO:1392, SEQ ID NO:1393, SEQ ID NO:1399, SEQ ID NO:1403, SEQ ID NO:1406, or SEQ ID NO:1407.

[0026] The disclosure also provides a variable domain sequence comprising a sequence that is at least 80%, at least 85%, at least 90%, or at least 95% identical to a sequence selected from SEQ ID NO:4, SEQ ID NO:5, SEQ ID NO:6, SEQ ID NO:6, SEQ ID NO:7, SEQ ID NO:7, SEQ ID NO:7, SEQ ID NO:7, SEQ ID NO:7, SEQ ID NO:7, SEQ ID NO:7, SEQ ID NO:8, SEQ ID NO:9, SEQ ID NO:10, SEQ ID NO:11, SEQ ID NO:12, SEQ ID NO:13, SEQ ID NO:14, SEQ ID NO:15, SEQ ID NO:16, SEQ ID NO:17, SEQ ID NO:17, SEQ ID NO:17, SEQ ID NO:18, SEQ ID NO:19, SEQ ID NO:20, SEQ ID NO:20, SEQ ID NO:20, SEQ ID NO:20, SEQ ID NO:21, SEQ ID NO:21, SEQ ID NO:22, SEQ ID NO:23, SEQ ID NO:23, SEQ ID NO:23, SEQ ID NO:24, SEQ ID NO:25, SEQ ID NO:26, SEQ ID NO:27, SEQ ID NO:27, SEQ ID NO:27, SEQ ID NO:27, SEQ ID NO:27, SEQ ID NO:28, SEQ ID NO:29, SEQ ID NO:30, SEQ ID NO:31, SEQ ID NO:32, SEQ ID NO:33, SEQ ID NO:33, SEQ ID NO:34, SEQ ID NO:35, SEQ ID NO:36, SEQ ID NO:36, SEQ ID NO:37, SEQ ID NO:38, SEQ ID NO:39, SEQ ID NO:40, SEQ ID NO:41, SEQ ID NO:42, SEQ ID NO:43, SEQ ID NO:44, SEQ ID NO:45, SEQ ID NO:46, SEQ ID NO:47, SEQ ID NO:48, SEQ ID NO:49, SEQ ID NO:50, SEQ ID NO:51, SEQ ID NO:51, SEQ ID NO:51, SEQ ID NO:52, SEQ ID NO:53, SEQ ID NO:54, SEQ ID NO:55, SEQ ID NO:55, SEQ ID NO:56, SEQ ID NO:57, SEQ ID NO:58, SEQ ID NO:58, SEQ ID NO:59, SEQ ID NO:60, SEQ ID NO:61, SEQ ID NO:62, SEQ ID NO:62, SEQ ID NO:62, SEQ ID NO:62, SEQ ID NO:62, SEQ ID NO:63, SEQ ID NO:64, SEQ ID NO:65, SEQ ID NO:66, SEQ ID NO:67, SEQ ID NO:67, SEQ ID NO:67, SEQ ID NO:68, SEQ ID NO:69, SEQ ID NO:70, SEQ ID NO:71, SEQ ID NO:72, SEQ ID NO:73, SEQ ID NO:74, SEQ ID NO:75, SEQ ID NO:75, SEQ ID NO:76, SEQ ID NO:77, SEQ ID NO:78, SEQ ID NO:79, SEQ ID NO:79, SEQ ID NO:80, SEQ ID NO:81, SEQ ID NO:82, SEQ ID NO:83, SEQ ID NO:84, SEQ ID NO:84, SEQ ID NO:84, SEQ ID NO:84, SEQ ID NO:84, SEQ ID NO:85, SEQ ID NO:86, SEQ ID NO:87, SEQ ID NO:88, SEQ ID NO:89, SEQ ID NO:90, SEQ ID NO:91, SEQ ID NO:92, SEQ ID NO:93, SEQ ID NO:93, SEQ ID NO:94, SEQ ID NO:95, SEQ ID NO:96, SEQ ID NO:97, SEQ ID NO:98, SEQ ID NO:99, SEQ ID NO:100, SEQ ID NO:101, SEQ ID NO:102, SEQ ID NO:102, SEQ ID NO:103, SEQ ID NO:104, SEQ ID NO:105, SEQ ID NO:106, SEQ ID NO:107, SEQ ID NO:108, SEQ ID NO:109, SEQ ID NO:110, SEQ ID NO:111, SEQ ID NO:112, SEQ ID NO:113, SEQ ID NO:114, SEQ ID NO:115, SEQ ID NO:116, SEQ ID NO:117, SEQ ID NO:118, SEQ ID NO:119, SEQ ID NO:120, SEQ ID NO:121, SEQ ID NO:122, SEQ ID NO:123, SEQ ID NO:124, SEQ ID NO:125, SEQ ID NO:126, SEQ ID NO:127, SEQ ID NO:128, SEQ ID NO:129, SEQ ID NO:130, SEQ ID NO:131, SEQ ID NO:132, SEQ ID NO:133, SEQ ID NO:134, SEQ ID NO:135, SEQ ID NO:136, SEQ ID NO:137, SEQ ID NO:138, SEQ ID NO:139, SEQ ID NO:140, SEQ ID NO:140, SEQ ID NO:141, SEQ ID NO:142, SEQ ID NO:143, SEQ ID NO:144, SEQ ID NO:145, SEQ ID NO:146, SEQ ID NO:147, SEQ ID NO:148, SEQ ID NO:149, SEQ ID NO:150, SEQ ID NO:151, SEQ ID NO:151, SEQ ID NO:152, SEQ ID NO:153, SEQ ID NO:154, SEQ ID NO:155, SEQ ID NO:156, SEQ ID NO:157, SEQ ID NO:158, SEQ ID NO:159, SEQ ID NO:160, SEQ ID NO:161, SEQ ID NO:162, SEQ ID NO:163, SEQ ID NO:163, SEQ ID NO:164, SEQ ID NO:164, SEQ ID NO:165, SEQ ID NO:166, SEQ ID NO:167, SEQ ID NO:168, SEQ ID NO:169, SEQ ID NO:170, SEQ ID NO:170, SEQ ID NO:171, SEQ ID NO:171, SEQ ID NO:171, SEQ ID NO:172, SEQ ID NO:173, SEQ ID NO:173, SEQ ID NO:173, SEQ ID NO:174, SEQ ID NO:175, SEQ ID NO:176, SEQ ID NO:176, SEQ ID NO:177, SEQ ID NO:177, SEQ ID NO:177, SEQ ID NO:177, SEQ ID NO:177, SEQ ID NO:178, SEQ ID NO:179, SEQ ID NO:180, SEQ ID NO:180, SEQ ID NO:181, SEQ ID NO:181, SEQ ID NO:182, SEQ ID NO:182, SEQ ID NO:182, SEQ ID NO:183, SEQ ID NO:183, SEQ ID NO:183, SEQ ID NO:184, SEQ ID NO:185, SEQ ID NO:186, SEQ ID NO:187, SEQ ID NO:188, SEQ ID NO:189, SEQ ID NO:189, SEQ ID NO:189, SEQ ID NO:190, SEQ ID NO:191, SEQ ID NO:192, SEQ ID NO:192, SEQ ID NO:193, SEQ ID NO:194, SEQ ID NO:195, SEQ ID NO:196, SEQ ID NO:197, SEQ ID NO:198, SEQ ID NO:198, SEQ ID NO:199, SEQ ID NO:200, SEQ ID NO:201, SEQ ID NO:201, SEQ ID NO:201, SEQ ID NO:201, SEQ ID NO:201, SEQ ID NO:201, SEQ ID NO:202, SEQ ID NO:203, SEQ ID NO:204, SEQ ID NO:205, SEQ ID NO:206, SEQ ID NO:207, SEQ ID NO:208, SEQ ID NO:209, SEQ ID NO:210, SEQ ID NO:210, SEQ ID NO:211, SEQ ID NO:212, SEQ ID NO:213, SEQ ID NO:214, SEQ ID NO:215, SEQ ID NO:216, SEQ ID NO:217, SEQ ID NO:218, SEQ ID NO:219, SEQ ID NO:220, SEQ ID NO:220, SEQ ID NO:221, SEQ ID NO:222, SEQ ID NO:223, SEQ ID NO:224, SEQ ID NO:224, SEQ ID NO:225, SEQ ID NO:226, SEQ ID NO:227, SEQ ID NO:228, SEQ ID NO:229, SEQ ID NO:230, SEQ ID NO:230, SEQ ID NO:231, SEQ ID NO:232, SEQ ID NO:233, SEQ ID NO:234, SEQ ID NO:235, SEQ ID NO:236, SEQ ID NO:237, SEQ ID NO:238, SEQ ID NO:238, SEQ ID NO:239, SEQ ID NO:240, SEQ ID NO:241, SEQ ID NO:242, SEQ ID NO:243, SEQ ID NO:244, SEQ ID NO:245, SEQ ID NO:246, SEQ ID NO:246, SEQ ID NO:247, SEQ ID NO:248, SEQ ID NO:249, SEQ ID NO:250, SEQ ID NO:251, SEQ ID NO:252, SEQ ID NO:253, SEQ ID NO:254, SEQ ID NO:255, SEQ ID NO:256, SEQ ID NO:257, SEQ ID NO:257, SEQ ID NO:258, SEQ ID NO:259, SEQ ID NO:260, SEQ ID NO:261, SEQ ID NO:262, SEQ ID NO:263, SEQ ID NO:264, SEQ ID NO:265, SEQ ID NO:266, SEQ ID NO:267, SEQ ID NO:267, SEQ ID NO:268, SEQ ID NO:269, SEQ ID NO:270, SEQ ID NO:271, SEQ ID NO:272, SEQ ID NO:273, SEQ ID NO:274, SEQ ID NO:275, SEQ ID NO:276, SEQ ID NO:277, SEQ ID NO:278, SEQ ID NO:279, SEQ ID NO:280, SEQ ID NO:281, SEQ ID NO:282, SEQ ID NO:283, SEQ ID NO:284, SEQ ID NO:285, SEQ ID NO:286, SEQ ID NO:287, SEQ ID NO:288, SEQ ID NO:289, SEQ ID NO:290, SEQ ID NO:291, SEQ ID NO:292, SEQ ID NO:293, SEQ ID NO:294, SEQ ID NO:295, SEQ ID NO:296, SEQ ID NO:297, SEQ ID NO:298, SEQ ID NO:299, SEQ ID NO:300, SEQ ID NO:301, SEQ ID NO:302, SEQ ID NO:303, SEQ ID NO:304, SEQ ID NO:305, SEQ ID NO:306, SEQ ID NO:307, SEQ ID NO:308, SEQ ID NO:309, SEQ ID NO:310, SEQ ID NO:311, SEQ ID NO:311, SEQ ID NO:312, SEQ ID NO:313, SEQ ID NO:313, SEQ ID NO:314, SEQ ID NO:315, SEQ ID NO:315, SEQ ID NO:316, SEQ ID NO:317, SEQ ID NO:318, SEQ ID NO:319, SEQ ID NO:319, SEQ ID NO:320, SEQ ID NO:321, SEQ ID NO:322, SEQ ID NO:323, SEQ ID NO:324, SEQ ID NO:325, SEQ ID NO:326, SEQ ID NO:327, SEQ ID NO:328, SEQ ID NO:329, SEQ ID NO:330, SEQ ID NO:331, SEQ ID NO:332, SEQ ID NO:333, SEQ ID NO:334, SEQ ID NO:335, SEQ ID NO:336, SEQ ID NO:337, SEQ ID NO:338, SEQ ID NO:339, SEQ ID NO:340, SEQ ID NO:341, SEQ ID NO:342, SEQ ID NO:343, SEQ ID NO:344, SEQ ID NO:345, SEQ ID NO:346, SEQ ID NO:347, SEQ ID NO:348, SEQ ID NO:349, SEQ ID NO:350, SEQ ID NO:351, SEQ ID NO:352, SEQ ID NO:353, SEQ ID NO:354, SEQ ID NO:355, SEQ ID NO:356, SEQ ID NO:357, SEQ ID NO:358, SEQ ID NO:359, SEQ ID NO:360, SEQ ID NO:361, SEQ ID NO:362, SEQ ID NO:363, SEQ ID NO:364, SEQ ID NO:365, SEQ ID NO:366, SEQ ID NO:367, SEQ ID NO:368, SEQ ID NO:369, SEQ ID NO:370, SEQ ID NO:371, SEQ ID NO:372, SEQ ID NO:373, SEQ ID NO:374, SEQ ID NO:375, SEQ ID NO:376, SEQ ID NO:377, SEQ ID NO:378, SEQ ID NO:379, SEQ ID NO:1366, SEQ ID NO:1369, SEQ ID NO:1372, SEQ ID NO:1373, SEQ ID NO:1376, SEQ ID NO:1377, SEQ ID NO:1380, SEQ ID NO:1381, SEQ ID NO:1384, SEQ ID NO:1385, SEQ ID NO:1388, SEQ ID NO:1389, SEQ ID NO:1391, SEQ ID NO:1394, SEQ ID NO:1395, SEQ ID NO:1396, SEQ ID NO:1397, SEQ ID NO:1398, SEQ ID NO:1400, SEQ ID NO:1401, SEQ ID NO:1402, SEQ ID NO:1404, or SEQ ID NO:1405. The disclosure also provides a variable domain sequence comprising a sequence that is at least 80%, at least 85%, at least 90%, or at least 95% identical to a sequence selected from SEQ ID NO:380, SEQ ID NO:380, SEQ ID NO:381, SEQ ID NO:381, SEQ ID NO:381, SEQ ID NO:381, SEQ ID NO:381, SEQ ID NO:381, SEQ ID NO:381, SEQ ID NO:381, SEQ ID NO:381, SEQ ID NO:381, SEQ ID NO:381, SEQ ID NO:381, SEQ ID NO:381, SEQ ID NO:381, SEQ ID NO:381, SEQ ID NO:381, SEQ ID NO:381, SEQ ID NO:381, SEQ ID NO:381, SEQ ID NO:381, SEQ ID NO:381, SEQ ID NO:381, SEQ ID NO:381, SEQ ID NO:381, SEQ ID NO:381, SEQ ID NO:381, SEQ ID NO:381, SEQ ID NO:381, SEQ ID NO:381, SEQ ID NO:381, SEQ ID NO:381, SEQ ID NO:381, SEQ ID NO:381, SEQ ID NO:381, SEQ ID NO:381, SEQ ID NO:381, SEQ ID NO:381, SEQ ID NO:381, SEQ ID NO:381, SEQ ID NO:381, SEQ ID NO:381, SEQ ID NO:381, SEQ ID NO:381, SEQ ID NO:381, SEQ ID NO:381, SEQ ID NO:381, SEQ ID NO:381, SEQ ID NO:381, SEQ ID NO:381, SEQ ID NO:381, SEQ ID NO:381, SEQ ID NO:381, SEQ ID NO:381, SEQ ID NO:381, SEQ ID NO:381, SEQ ID NO:381, SEQ ID NO:381, SEQ ID NO:381, SEQ ID NO:381, SEQ ID NO:381, SEQ ID NO:381, SEQ ID NO:381, SEQ ID NO:382, SEQ ID NO:382, SEQ ID NO:382, SEQ ID NO:382, SEQ ID NO:382, SEQ ID NO:383, SEQ ID NO:384, SEQ ID NO:385, SEQ ID NO:385, SEQ ID NO:385, SEQ ID NO:385, SEQ ID NO:385, SEQ ID NO:385, SEQ ID NO:385, SEQ ID NO:386, SEQ ID NO:387, SEQ ID NO:388, SEQ ID NO:389, SEQ ID NO:389, SEQ ID NO:390, SEQ ID NO:391, SEQ ID NO:392, SEQ ID NO:393, SEQ ID NO:394, SEQ ID NO:395, SEQ ID NO:396, SEQ ID NO:396, SEQ ID NO:397, SEQ ID NO:398, SEQ ID NO:398, SEQ ID NO:398, SEQ ID NO:398, SEQ ID NO:398, SEQ ID NO:398, SEQ ID NO:398, SEQ ID NO:398, SEQ ID NO:399, SEQ ID NO:399, SEQ ID NO:400, SEQ ID NO:401, SEQ ID NO:401, SEQ ID NO:402, SEQ ID NO:403, SEQ ID NO:404, SEQ ID NO:404, SEQ ID NO:405, SEQ ID NO:406, SEQ ID NO:406, SEQ ID NO:406, SEQ ID NO:407, SEQ ID NO:408, SEQ ID NO:409, SEQ ID NO:410, SEQ ID NO:410, SEQ ID NO:411, SEQ ID NO:412, SEQ ID NO:413, SEQ ID NO:414, SEQ ID NO:415, SEQ ID NO:416, SEQ ID NO:417, SEQ ID NO:418, SEQ ID NO:419, SEQ ID NO:420, SEQ ID NO:421, SEQ ID NO:422, SEQ ID NO:423, SEQ ID NO:424, SEQ ID NO:425, SEQ ID NO:426, SEQ ID NO:427, SEQ ID NO:428, SEQ ID NO:429, SEQ ID NO:430, SEQ ID NO:431, SEQ ID NO:432, SEQ ID NO:433, SEQ ID NO:434, SEQ ID NO:435, SEQ ID NO:436, SEQ ID NO:437, SEQ ID NO:438, SEQ ID NO:439, SEQ ID NO:440, SEQ ID NO:441, SEQ ID NO:442, SEQ ID NO:443, SEQ ID NO:444, SEQ ID NO:445, SEQ ID NO:445, SEQ ID NO:446, SEQ ID NO:447, SEQ ID NO:448, SEQ ID NO:449, SEQ ID NO:450, SEQ ID NO:451, SEQ ID NO:451, SEQ ID NO:451, SEQ ID NO:452, SEQ ID NO:453, SEQ ID NO:454, SEQ ID NO:455, SEQ ID NO:456, SEQ ID NO:456, SEQ ID NO:457, SEQ ID NO:458, SEQ ID NO:459, SEQ ID NO:460, SEQ ID NO:461, SEQ ID NO:462, SEQ ID NO:462, SEQ ID NO:463, SEQ ID NO:464, SEQ ID NO:465, SEQ ID NO:466, SEQ ID NO:466, SEQ ID NO:466, SEQ ID NO:466, SEQ ID NO:467, SEQ ID NO:468, SEQ ID NO:469, SEQ ID NO:469, SEQ ID NO:469, SEQ ID NO:469, SEQ ID NO:470, SEQ ID NO:471, SEQ ID NO:472, SEQ ID NO:473, SEQ ID NO:474, SEQ ID NO:474, SEQ ID NO:475, SEQ ID NO:476, SEQ ID NO:477, SEQ ID NO:478, SEQ ID NO:479, SEQ ID NO:479, SEQ ID NO:480, SEQ ID NO:481, SEQ ID NO:482, SEQ ID NO:482, SEQ ID NO:482, SEQ ID NO:482, SEQ ID NO:482, SEQ ID NO:482, SEQ ID NO:482, SEQ ID NO:482, SEQ ID NO:482, SEQ ID NO:483, SEQ ID NO:483, SEQ ID NO:484, SEQ ID NO:485, SEQ ID NO:486, SEQ ID NO:486, SEQ ID NO:487, SEQ ID NO:488, SEQ ID NO:489, SEQ ID NO:490, SEQ ID NO:491, SEQ ID NO:492, SEQ ID NO:493, SEQ ID NO:494, SEQ ID NO:495, SEQ ID NO:496, SEQ ID NO:497, SEQ ID NO:498, SEQ ID NO:499, SEQ ID NO:500, SEQ ID NO:501, SEQ ID NO:502, SEQ ID NO:503, SEQ ID NO:504, SEQ ID NO:505, SEQ ID NO:506, SEQ ID NO:506, SEQ ID NO:507, SEQ ID NO:508, SEQ ID NO:509, SEQ ID NO:510, SEQ ID NO:511, SEQ ID NO:512, SEQ ID NO:512, SEQ ID NO:513, SEQ ID NO:514, SEQ ID NO:515, SEQ ID NO:515, SEQ ID NO:515, SEQ ID NO:516, SEQ ID NO:517, SEQ ID NO:517, SEQ ID NO:518, SEQ ID NO:519, SEQ ID NO:520, SEQ ID NO:521, SEQ ID NO:522, SEQ ID NO:523, SEQ ID NO:524, SEQ ID NO:525, SEQ ID NO:526, SEQ ID NO:527, SEQ ID NO:527, SEQ ID NO:528, SEQ ID NO:529, SEQ ID NO:529, SEQ ID NO:529, SEQ ID NO:530, SEQ ID NO:531, SEQ ID NO:531, SEQ ID NO:531, SEQ ID NO:532, SEQ ID NO:533, SEQ ID NO:534, SEQ ID NO:535, SEQ ID NO:536, SEQ ID NO:537, SEQ ID NO:538, SEQ ID NO:539, SEQ ID NO:540, SEQ ID NO:540, SEQ ID NO:541, SEQ ID NO:542, SEQ ID NO:543, SEQ ID NO:544, SEQ ID NO:545, SEQ ID NO:546, SEQ ID NO:547, SEQ ID NO:548, SEQ ID NO:549, SEQ ID NO:550, SEQ ID NO:551, SEQ ID NO:552, SEQ ID NO:552, SEQ ID NO:552, SEQ ID NO:552, SEQ ID NO:552, SEQ ID NO:552, SEQ ID NO:553, SEQ ID NO:554, SEQ ID NO:555, SEQ ID NO:556, SEQ ID NO:557, SEQ ID NO:558, SEQ ID NO:559, SEQ ID NO:560, SEQ ID NO:561, SEQ ID NO:562, SEQ ID NO:563, SEQ ID NO:564, SEQ ID NO:565, SEQ ID NO:566, SEQ ID NO:567, SEQ ID NO:568, SEQ ID NO:569, SEQ ID NO:570, SEQ ID NO:571, SEQ ID NO:572, SEQ ID NO:572, SEQ ID NO:572, SEQ ID NO:572, SEQ ID NO:572, SEQ ID NO:572, SEQ ID NO:572, SEQ ID NO:573, SEQ ID NO:574, SEQ ID NO:575, SEQ ID NO:576, SEQ ID NO:577, SEQ ID NO:578, SEQ ID NO:579, SEQ ID NO:580, SEQ ID NO:580, SEQ ID NO:581, SEQ ID NO:582, SEQ ID NO:583, SEQ ID NO:584, SEQ ID NO:585, SEQ ID NO:586, SEQ ID NO:587, SEQ ID NO:588, SEQ ID NO:589, SEQ ID NO:590, SEQ ID NO:591, SEQ ID NO:592, SEQ ID NO:593, SEQ ID NO:594, SEQ ID NO:595, SEQ ID NO:596, SEQ ID NO:596, SEQ ID NO:596, SEQ ID NO:596, SEQ ID NO:597, SEQ ID NO:598, SEQ ID NO:599, SEQ ID NO:600, SEQ ID NO:601, SEQ ID NO:602, SEQ ID NO:603, SEQ ID NO:604, SEQ ID NO:605, SEQ ID NO:606, SEQ ID NO:607, SEQ ID NO:608, SEQ ID NO:608, SEQ ID NO:609, SEQ ID NO:610, SEQ ID NO:611, SEQ ID NO:612, SEQ ID NO:612, SEQ ID NO:613, SEQ ID NO:614, SEQ ID NO:615, SEQ ID NO:616, SEQ ID NO:617, SEQ ID NO:618, SEQ ID NO:619, SEQ ID NO:620, SEQ ID NO:621, SEQ ID NO:622, SEQ ID NO:623, SEQ ID NO:624, SEQ ID NO:625, SEQ ID NO:626, SEQ ID NO:627, SEQ ID NO:628, SEQ ID NO:629, SEQ ID NO:630, SEQ ID NO:631, SEQ ID NO:632, SEQ ID NO:633, SEQ ID NO:634, SEQ ID NO:635, SEQ ID NO:636, SEQ ID NO:637, SEQ ID NO:638, SEQ ID NO:639, SEQ ID NO:640, SEQ ID NO:641, SEQ ID NO:642, SEQ ID NO:643, SEQ ID NO:643, SEQ ID NO:643, SEQ ID NO:644, SEQ ID NO:645, SEQ ID NO:645, SEQ ID NO:645, SEQ ID NO:645, SEQ ID NO:645, SEQ ID NO:645, SEQ ID NO:646, SEQ ID NO:647, SEQ ID NO:648, SEQ ID NO:649, SEQ ID NO:650, SEQ ID NO:651, SEQ ID NO:652, SEQ ID NO:652, SEQ ID NO:653, SEQ ID NO:654, SEQ ID NO:655, SEQ ID NO:656, SEQ ID NO:657, SEQ ID NO:658, SEQ ID NO:658, SEQ ID NO:659, SEQ ID NO:660, SEQ ID NO:661, SEQ ID NO:662, SEQ ID NO:663, SEQ ID NO:664, SEQ ID NO:665, SEQ ID NO:666, SEQ ID NO:667, SEQ ID NO:667, SEQ ID NO:668, SEQ ID NO:669, SEQ ID NO:669, SEQ ID NO:670, SEQ ID NO:671, SEQ ID NO:672, SEQ ID NO:673, SEQ ID NO:674, SEQ ID NO:675, SEQ ID NO:676, SEQ ID NO:677, SEQ ID NO:678, SEQ ID NO:679, SEQ ID NO:680, SEQ ID NO:681, SEQ ID NO:682, SEQ ID NO:683, SEQ ID NO:684, SEQ ID NO:685, SEQ ID NO:686, SEQ ID NO:1367, SEQ ID NO:1368, SEQ ID NO:1370, SEQ ID NO:1371, SEQ ID NO:1374, SEQ ID NO:1375, SEQ ID NO:1378, SEQ ID NO:1379, SEQ ID NO:1382, SEQ ID NO:1383, SEQ ID NO:1386, SEQ ID NO:1387, SEQ ID NO:1390, SEQ ID NO:1392, SEQ ID NO:1393, SEQ ID NO:1399, SEQ ID NO:1403, SEQ ID NO:1406, or SEQ ID NO:1407. The disclosure also provides antibodies comprising a heavy chain variable domain sequence that is at least 80%, at least 85%, at least 90%, or at least 95% identical to SEQ ID NO:4 and a light chain variable domain sequence that is at least 80%, at least 85%, at least 90%, or at least 95% identical to SEQ ID NO:380. The disclosure also provides antibodies comprising a heavy chain variable domain sequence that is at least 80%, at least 85%, at least 90%, or at least 95% identical to SEQ ID NO:5 and a light chain variable domain sequence that is at least 80%, at least 85%, at least 90%, or at least 95% identical to SEQ ID NO:381. The disclosure also provides antibodies comprising a heavy chain variable domain sequence that is at least 80%, at least 85%, at least 90%, or at least 95% identical to SEQ ID NO:6 and a light chain variable domain sequence that is at least 80%, at least 85%, at least 90%, or at least 95% identical to SEQ ID NO:381. The disclosure also provides antibodies comprising a heavy chain variable domain sequence that is at least 80%, at least 85%, at least 90%, or at least 95% identical to SEQ ID NO:7 and a light chain variable domain sequence that is at least 80%, at least 85%, at least 90%, or at least 95% identical to SEQ ID NO:382. The disclosure also provides antibodies comprising a heavy chain variable domain sequence that is at least 80%, at least 85%, at least 90%, or at least 95% identical to SEQ ID NO:8 and a light chain variable domain sequence that is at least 80%, at least 85%, at least 90%, or at least 95% identical to SEQ ID NO:381. The disclosure also provides antibodies comprising a heavy chain variable domain sequence that is at least 80%, at least 85%, at least 90%, or at least 95% identical to SEQ ID NO:9 and a light chain variable domain sequence that is at least 80%, at least 85%, at least 90%, or at least 95% identical to SEQ ID NO:381. The disclosure also provides antibodies comprising a heavy chain variable domain sequence that is at least 80%, at least 85%, at least 90%, or at least 95% identical to SEQ ID NO:10 and a light chain variable domain sequence that is at least 80%, at least 85%, at least 90%, or at least 95% identical to SEQ ID NO:383. The disclosure also provides antibodies comprising a heavy chain variable domain sequence that is at least 80%, at least 85%, at least 90%, or at least 95% identical to SEQ ID NO:11 and a light chain variable domain sequence that is at least 80%, at least 85%, at least 90%, or at least 95% identical to SEQ ID NO:381. The disclosure also provides antibodies comprising a heavy chain variable domain sequence that is at least 80%, at least 85%, at least 90%, or at least 95% identical to SEQ ID NO:12 and a light chain variable domain sequence that is at least 80%, at least 85%, at least 90%, or at least 95% identical to SEQ ID NO:384. The disclosure also provides antibodies comprising a heavy chain variable domain sequence that is at least 80%, at least 85%, at least 90%, or at least 95% identical to SEQ ID NO:13 and a light chain variable domain sequence that is at least 80%, at least 85%, at least 90%, or at least 95% identical to SEQ ID NO:385. The disclosure also provides antibodies comprising a heavy chain variable domain sequence that is at least 80%, at least 85%, at least 90%, or at least 95% identical to SEQ ID NO:14 and a light chain variable domain sequence that is at least 80%, at least 85%, at least 90%, or at least 95% identical to SEQ ID NO:381. The disclosure also provides antibodies comprising a heavy chain variable domain sequence that is at least 80%, at least 85%, at least 90%, or at least 95% identical to SEQ ID NO:15 and a light chain variable domain sequence that is at least 80%, at least 85%, at least 90%, or at least 95% identical to SEQ ID NO:386. The disclosure also provides antibodies comprising a heavy chain variable domain sequence that is at least 80%, at least 85%, at least 90%, or at least 95% identical to SEQ ID NO:16 and a light chain variable domain sequence that is at least 80%, at least 85%, at least 90%, or at least 95% identical to SEQ ID NO:381. The disclosure also provides antibodies comprising a heavy chain variable domain sequence that is at least 80%, at least 85%, at least 90%, or at least 95% identical to SEQ ID NO:17 and a light chain variable domain sequence that is at least 80%, at least 85%, at least 90%, or at least 95% identical to SEQ ID NO:381. The disclosure also provides antibodies comprising a heavy chain variable domain sequence that is at least 80%, at least 85%, at least 90%, or at least 95% identical to SEQ ID NO:18 and a light chain variable domain sequence that is at least 80%, at least 85%, at least 90%, or at least 95% identical to SEQ ID NO:387. The disclosure also provides antibodies comprising a heavy chain variable domain sequence that is at least 80%, at least 85%, at least 90%, or at least 95% identical to SEQ ID NO:19 and a light chain variable domain sequence that is at least 80%, at least 85%, at least 90%, or at least 95% identical to SEQ ID NO:388. The disclosure also provides antibodies comprising a heavy chain variable domain sequence that is at least 80%, at least 85%, at least 90%, or at least 95% identical to SEQ ID NO:20 and a light chain variable domain sequence that is at least 80%, at least 85%, at least 90%, or at least 95% identical to SEQ ID NO:389. The disclosure also provides antibodies comprising a heavy chain variable domain sequence that is at least 80%, at least 85%, at least 90%, or at least 95% identical to SEQ ID NO:21 and a light chain variable domain sequence that is at least 80%, at least 85%, at least 90%, or at least 95% identical to SEQ ID NO:381. The disclosure also provides antibodies comprising a heavy chain variable domain sequence that is at least 80%, at least 85%, at least 90%, or at least 95% identical to SEQ ID NO:22 and a light chain variable domain sequence that is at least 80%, at least 85%, at least 90%, or at least 95% identical to SEQ ID NO:390. The disclosure also provides antibodies comprising a heavy chain variable domain sequence that is at least 80%, at least 85%, at least 90%, or at least 95% identical to SEQ ID NO:23 and a light chain variable domain sequence that is at least 80%, at least 85%, at least 90%, or at least 95% identical to SEQ ID NO:381. The disclosure also provides antibodies comprising a heavy chain variable domain sequence that is at least 80%, at least 85%, at least 90%, or at least 95% identical to SEQ ID NO:24 and a light chain variable domain sequence that is at least 80%, at least 85%, at least 90%, or at least 95% identical to SEQ ID NO:391. The disclosure also provides antibodies comprising a heavy chain variable domain sequence that is at least 80%, at least 85%, at least 90%, or at least 95% identical to SEQ ID NO:20 and a light chain variable domain sequence that is at least 80%, at least 85%, at least 90%, or at least 95% identical to SEQ ID NO:381. The disclosure also provides antibodies comprising a heavy chain variable domain sequence that is at least 80%, at least 85%, at least 90%, or at least 95% identical to SEQ ID NO:25 and a light chain variable domain sequence that is at least 80%, at least 85%, at least 90%, or at least 95% identical to SEQ ID NO:381. The disclosure also provides antibodies comprising a heavy chain variable domain sequence that is at least 80%, at least 85%, at least 90%, or at least 95% identical to SEQ ID NO:26 and a light chain variable domain sequence that is at least 80%, at least 85%, at least 90%, or at least 95% identical to SEQ ID NO:392. The disclosure also provides antibodies comprising a heavy chain variable domain sequence that is at least 80%, at least 85%, at least 90%, or at least 95% identical to SEQ ID NO:27 and a light chain variable domain sequence that is at least 80%, at least 85%, at least 90%, or at least 95% identical to SEQ ID NO:381. The disclosure also provides antibodies comprising a heavy chain variable domain sequence that is at least 80%, at least 85%, at least 90%, or at least 95% identical to SEQ ID NO:28 and a light chain variable domain sequence that is at least 80%, at least 85%, at least 90%, or at least 95% identical to SEQ ID NO:393. The disclosure also provides antibodies comprising a heavy chain variable domain sequence that is at least 80%, at least 85%, at least 90%, or at least 95% identical to SEQ ID NO:29 and a light chain variable domain sequence that is at least 80%, at least 85%, at least 90%, or at least 95% identical to SEQ ID NO:394. The disclosure also provides antibodies comprising a heavy chain variable domain sequence that is at least 80%, at least 85%, at least 90%, or at least 95% identical to SEQ ID NO:30 and a light chain variable domain sequence that is at least 80%, at least 85%, at least 90%, or at least 95% identical to SEQ ID NO:395. The disclosure also provides antibodies comprising a heavy chain variable domain sequence that is at least 80%, at least 85%, at least 90%, or at least 95% identical to SEQ ID NO:31 and a light chain variable domain sequence that is at least 80%, at least 85%, at least 90%, or at least 95% identical to SEQ ID NO:396. The disclosure also provides antibodies comprising a heavy chain variable domain sequence that is at least 80%, at least 85%, at least 90%, or at least 95% identical to SEQ ID NO:32 and a light chain variable domain sequence that is at least 80%, at least 85%, at least 90%, or at least 95% identical to SEQ ID NO:381. The disclosure also provides antibodies comprising a heavy chain variable domain sequence that is at least 80%, at least 85%, at least 90%, or at least 95% identical to SEQ ID NO:33 and a light chain variable domain sequence that is at least 80%, at least 85%, at least 90%, or at least 95% identical to SEQ ID NO:397. The disclosure also provides antibodies comprising a heavy chain variable domain sequence that is at least 80%, at least 85%, at least 90%, or at least 95% identical to SEQ ID NO:34 and a light chain variable domain sequence that is at least 80%, at least 85%, at least 90%, or at least 95% identical to SEQ ID NO:381. The disclosure also provides antibodies comprising a heavy chain variable domain sequence that is at least 80%, at least 85%, at least 90%, or at least 95% identical to SEQ ID NO:35 and a light chain variable domain sequence that is at least 80%, at least 85%, at least 90%, or at least 95% identical to SEQ ID NO:398. The disclosure also provides antibodies comprising a heavy chain variable domain sequence that is at least 80%, at least 85%, at least 90%, or at least 95% identical to SEQ ID NO:36 and a light chain variable domain sequence that is at least 80%, at least 85%, at least 90%, or at least 95% identical to SEQ ID NO:399. The disclosure also provides antibodies comprising a heavy chain variable domain sequence that is at least 80%, at least 85%, at least 90%, or at least 95% identical to SEQ ID NO:37 and a light chain variable domain sequence that is at least 80%, at least 85%, at least 90%, or at least 95% identical to SEQ ID NO:400. The disclosure also provides antibodies comprising a heavy chain variable domain sequence that is at least 80%, at least 85%, at least 90%, or at least 95% identical to SEQ ID NO:38 and a light chain variable domain sequence that is at least 80%, at least 85%, at least 90%, or at least 95% identical to SEQ ID NO:401. The disclosure also provides antibodies comprising a heavy chain variable domain sequence that is at least 80%, at least 85%, at least 90%, or at least 95% identical to SEQ ID NO:39 and a light chain variable domain sequence that is at least 80%, at least 85%, at least 90%, or at least 95% identical to SEQ ID NO:402. The disclosure also provides antibodies comprising a heavy chain variable domain sequence that is at least 80%, at least 85%, at least 90%, or at least 95% identical to SEQ ID NO:40 and a light chain variable domain sequence that is at least 80%, at least 85%, at least 90%, or at least 95% identical to SEQ ID NO:380. The disclosure also provides antibodies comprising a heavy chain variable domain sequence that is at least 80%, at least 85%, at least 90%, or at least 95% identical to SEQ ID NO:41 and a light chain variable domain sequence that is at least 80%, at least 85%, at least 90%, or at least 95% identical to SEQ ID NO:403. The disclosure also provides antibodies comprising a heavy chain variable domain sequence that is at least 80%, at least 85%, at least 90%, or at least 95% identical to SEQ ID NO:42 and a light chain variable domain sequence that is at least 80%, at least 85%, at least 90%, or at least 95% identical to SEQ ID NO:398. The disclosure also provides antibodies comprising a heavy chain variable domain sequence that is at least 80%, at least 85%, at least 90%, or at least 95% identical to SEQ ID NO:43 and a light chain variable domain sequence that is at least 80%, at least 85%, at least 90%, or at least 95% identical to SEQ ID NO:404. The disclosure also provides antibodies comprising a heavy chain variable domain sequence that is at least 80%, at least 85%, at least 90%, or at least 95% identical to SEQ ID NO:6 and a light chain variable domain sequence that is at least 80%, at least 85%, at least 90%, or at least 95% identical to SEQ ID NO:405. The disclosure also provides antibodies comprising a heavy chain variable domain sequence that is at least 80%, at least 85%, at least 90%, or at least 95% identical to SEQ ID NO:27 and a light chain variable domain sequence that is at least 80%, at least 85%, at least 90%, or at least 95% identical to SEQ ID NO:406. The disclosure also provides antibodies comprising a heavy chain variable domain sequence that is at least 80%, at least 85%, at least 90%, or at least 95% identical to SEQ ID NO:23 and a light chain variable domain sequence that is at least 80%, at least 85%, at least 90%, or at least 95% identical to SEQ ID NO:382. The disclosure also provides antibodies comprising a heavy chain variable domain sequence that is at least 80%, at least 85%, at least 90%, or at least 95% identical to SEQ ID NO:20 and a light chain variable domain sequence that is at least 80%, at least 85%, at least 90%, or at least 95% identical to SEQ ID NO:406. The disclosure also provides antibodies comprising a heavy chain variable domain sequence that is at least 80%, at least 85%, at least 90%, or at least 95% identical to SEQ ID NO:44 and a light chain variable domain sequence that is at least 80%, at least 85%, at least 90%, or at least 95% identical to SEQ ID NO:398. The disclosure also provides antibodies comprising a heavy chain variable domain sequence that is at least 80%, at least 85%, at least 90%, or at least 95% identical to SEQ ID NO:45 and a light chain variable domain sequence that is at least 80%, at least 85%, at least 90%, or at least 95% identical to SEQ ID NO:381. The disclosure also provides antibodies comprising a heavy chain variable domain sequence that is at least 80%, at least 85%, at least 90%, or at least 95% identical to SEQ ID NO:46 and a light chain variable domain sequence that is at least 80%, at least 85%, at least 90%, or at least 95% identical to SEQ ID NO:399. The disclosure also provides antibodies comprising a heavy chain variable domain sequence that is at least 80%, at least 85%, at least 90%, or at least 95% identical to SEQ ID NO:47 and a light chain variable domain sequence that is at least 80%, at least 85%, at least 90%, or at least 95% identical to SEQ ID NO:407. The disclosure also provides antibodies comprising a heavy chain variable domain sequence that is at least 80%, at least 85%, at least 90%, or at least 95% identical to SEQ ID NO:21 and a light chain variable domain sequence that is at least 80%, at least 85%, at least 90%, or at least 95% identical to SEQ ID NO:382. The disclosure also provides antibodies comprising a heavy chain variable domain sequence that is at least 80%, at least 85%, at least 90%, or at least 95% identical to SEQ ID NO:48 and a light chain variable domain sequence that is at least 80%, at least 85%, at least 90%, or at least 95% identical to SEQ ID NO:408. The disclosure also provides antibodies comprising a heavy chain variable domain sequence that is at least 80%, at least 85%, at least 90%, or at least 95% identical to SEQ ID NO:49 and a light chain variable domain sequence that is at least 80%, at least 85%, at least 90%, or at least 95% identical to SEQ ID NO:409. The disclosure also provides antibodies comprising a heavy chain variable domain sequence that is at least 80%, at least 85%, at least 90%, or at least 95% identical to SEQ ID NO:50 and a light chain variable domain sequence that is at least 80%, at least 85%, at least 90%, or at least 95% identical to SEQ ID NO:410. The disclosure also provides antibodies comprising a heavy chain variable domain sequence that is at least 80%, at least 85%, at least 90%, or at least 95% identical to SEQ ID NO:51 and a light chain variable domain sequence that is at least 80%, at least 85%, at least 90%, or at least 95% identical to SEQ ID NO:411. The disclosure also provides antibodies comprising a heavy chain variable domain sequence that is at least 80%, at least 85%, at least 90%, or at least 95% identical to SEQ ID NO:52 and a light chain variable domain sequence that is at least 80%, at least 85%, at least 90%, or at least 95% identical to SEQ ID NO:412. The disclosure also provides antibodies comprising a heavy chain variable domain sequence that is at least 80%, at least 85%, at least 90%, or at least 95% identical to SEQ ID NO:53 and a light chain variable domain sequence that is at least 80%, at least 85%, at least 90%, or at least 95% identical to SEQ ID NO:413. The disclosure also provides antibodies comprising a heavy chain variable domain sequence that is at least 80%, at least 85%, at least 90%, or at least 95% identical to SEQ ID NO:54 and a light chain variable domain sequence that is at least 80%, at least 85%, at least 90%, or at least 95% identical to SEQ ID NO:414. The disclosure also provides antibodies comprising a heavy chain variable domain sequence that is at least 80%, at least 85%, at least 90%, or at least 95% identical to SEQ ID NO:55 and a light chain variable domain sequence that is at least 80%, at least 85%, at least 90%, or at least 95% identical to SEQ ID NO:381. The disclosure also provides antibodies comprising a heavy chain variable domain sequence that is at least 80%, at least 85%, at least 90%, or at least 95% identical to SEQ ID NO:56 and a light chain variable domain sequence that is at least 80%, at least 85%, at least 90%, or at least 95% identical to SEQ ID NO:415. The disclosure also provides antibodies comprising a heavy chain variable domain sequence that is at least 80%, at least 85%, at least 90%, or at least 95% identical to SEQ ID NO:57 and a light chain variable domain sequence that is at least 80%, at least 85%, at least 90%, or at least 95% identical to SEQ ID NO:381. The disclosure also provides antibodies comprising a heavy chain variable domain sequence that is at least 80%, at least 85%, at least 90%, or at least 95% identical to SEQ ID NO:58 and a light chain variable domain sequence that is at least 80%, at least 85%, at least 90%, or at least 95% identical to SEQ ID NO:381. The disclosure also provides antibodies comprising a heavy chain variable domain sequence that is at least 80%, at least 85%, at least 90%, or at least 95% identical to SEQ ID NO:33 and a light chain variable domain sequence that is at least 80%, at least 85%, at least 90%, or at least 95% identical to SEQ ID NO:416. The disclosure also provides antibodies comprising a heavy chain variable domain sequence that is at least 80%, at least 85%, at least 90%, or at least 95% identical to SEQ ID NO:59 and a light chain variable domain sequence that is at least 80%, at least 85%, at least 90%, or at least 95% identical to SEQ ID NO:417. The disclosure also provides antibodies comprising a heavy chain variable domain sequence that is at least 80%, at least 85%, at least 90%, or at least 95% identical to SEQ ID NO:60 and a light chain variable domain sequence that is at least 80%, at least 85%, at least 90%, or at least 95% identical to SEQ ID NO:381. The disclosure also provides antibodies comprising a heavy chain variable domain sequence that is at least 80%, at least 85%, at least 90%, or at least 95% identical to SEQ ID NO:61 and a light chain variable domain sequence that is at least 80%, at least 85%, at least 90%, or at least 95% identical to SEQ ID NO:418. The disclosure also provides antibodies comprising a heavy chain variable domain sequence that is at least 80%, at least 85%, at least 90%, or at least 95% identical to SEQ ID NO:20 and a light chain variable domain sequence that is at least 80%, at least 85%, at least 90%, or at least 95% identical to SEQ ID NO:419. The disclosure also provides antibodies comprising a heavy chain variable domain sequence that is at least 80%, at least 85%, at least 90%, or at least 95% identical to SEQ ID NO:62 and a light chain variable domain sequence that is at least 80%, at least 85%, at least 90%, or at least 95% identical to SEQ ID NO:401. The disclosure also provides antibodies comprising a heavy chain variable domain sequence that is at least 80%, at least 85%, at least 90%, or at least 95% identical to SEQ ID NO:7 and a light chain variable domain sequence that is at least 80%, at least 85%, at least 90%, or at least 95% identical to SEQ ID NO:385. The disclosure also provides antibodies comprising a heavy chain variable domain sequence that is at least 80%, at least 85%, at least 90%, or at least 95% identical to SEQ ID NO:62 and a light chain variable domain sequence that is at least 80%, at least 85%, at least 90%, or at least 95% identical to SEQ ID NO:420. The disclosure also provides antibodies comprising a heavy chain variable domain sequence that is at least 80%, at least 85%, at least 90%, or at least 95% identical to SEQ ID NO:63 and a light chain variable domain sequence that is at least 80%, at least 85%, at least 90%, or at least 95% identical to SEQ ID NO:381. The disclosure also provides antibodies comprising a heavy chain variable domain sequence that is at least 80%, at least 85%, at least 90%, or at least 95% identical to SEQ ID NO:62 and a light chain variable domain sequence that is at least 80%, at least 85%, at least 90%, or at least 95% identical to SEQ ID NO:421. The disclosure also provides antibodies comprising a heavy chain variable domain sequence that is at least 80%, at least 85%, at least 90%, or at least 95% identical to SEQ ID NO:64 and a light chain variable domain sequence that is at least 80%, at least 85%, at least 90%, or at least 95% identical to SEQ ID NO:381. The disclosure also provides antibodies comprising a heavy chain variable domain sequence that is at least 80%, at least 85%, at least 90%, or at least 95% identical to SEQ ID NO:7 and a light chain variable domain sequence that is at least 80%, at least 85%, at least 90%, or at least 95% identical to SEQ ID NO:422. The disclosure also provides antibodies comprising a heavy chain variable domain sequence that is at least 80%, at least 85%, at least 90%, or at least 95% identical to SEQ ID NO:65 and a light chain variable domain sequence that is at least 80%, at least 85%, at least 90%, or at least 95% identical to SEQ ID NO:423. The disclosure also provides antibodies comprising a heavy chain variable domain sequence that is at least 80%, at least 85%, at least 90%, or at least 95% identical to SEQ ID NO:66 and a light chain variable domain sequence that is at least 80%, at least 85%, at least 90%, or at least 95% identical to SEQ ID NO:424. The disclosure also provides antibodies comprising a heavy chain variable domain sequence that is at least 80%, at least 85%, at least 90%, or at least 95% identical to SEQ ID NO:67 and a light chain variable domain sequence that is at least 80%, at least 85%, at least 90%, or at least 95% identical to SEQ ID NO:425. The disclosure also provides antibodies comprising a heavy chain variable domain sequence that is at least 80%, at least 85%, at least 90%, or at least 95% identical to SEQ ID NO:55 and a light chain variable domain sequence that is at least 80%, at least 85%, at least 90%, or at least 95% identical to SEQ ID NO:426. The disclosure also provides antibodies comprising a heavy chain variable domain sequence that is at least 80%, at least 85%, at least 90%, or at least 95% identical to SEQ ID NO:68 and a light chain variable domain sequence that is at least 80%, at least 85%, at least 90%, or at least 95% identical to SEQ ID NO:381. The disclosure also provides antibodies comprising a heavy chain variable domain sequence that is at least 80%, at least 85%, at least 90%, or at least 95% identical to SEQ ID NO:69 and a light chain variable domain sequence that is at least 80%, at least 85%, at least 90%, or at least 95% identical to SEQ ID NO:381. The disclosure also provides antibodies comprising a heavy chain variable domain sequence that is at least 80%, at least 85%, at least 90%, or at least 95% identical to SEQ ID NO:62 and a light chain variable domain sequence that is at least 80%, at least 85%, at least 90%, or at least 95% identical to SEQ ID NO:381. The disclosure also provides antibodies comprising a heavy chain variable domain sequence that is at least 80%, at least 85%, at least 90%, or at least 95% identical to SEQ ID NO:70 and a light chain variable domain sequence that is at least 80%, at least 85%, at least 90%, or at least 95% identical to SEQ ID NO:381. The disclosure also provides antibodies comprising a heavy chain variable domain sequence that is at least 80%, at least 85%, at least 90%, or at least 95% identical to SEQ ID NO:71 and a light chain variable domain sequence that is at least 80%, at least 85%, at least 90%, or at least 95% identical to SEQ ID NO:381. The disclosure also provides antibodies comprising a heavy chain variable domain sequence that is at least 80%, at least 85%, at least 90%, or at least 95% identical to SEQ ID NO:36 and a light chain variable domain sequence that is at least 80%, at least 85%, at least 90%, or at least 95% identical to SEQ ID NO:381. The disclosure also provides antibodies comprising a heavy chain variable domain sequence that is at least 80%, at least 85%, at least 90%, or at least 95% identical to SEQ ID NO:72 and a light chain variable domain sequence that is at least 80%, at least 85%, at least 90%, or at least 95% identical to SEQ ID NO:385. The disclosure also provides antibodies comprising a heavy chain variable domain sequence that is at least 80%, at least 85%, at least 90%, or at least 95% identical to SEQ ID NO:73 and a light chain variable domain sequence that is at least 80%, at least 85%, at least 90%, or at least 95% identical to SEQ ID NO:381. The disclosure also provides antibodies comprising a heavy chain variable domain sequence that is at least 80%, at least 85%, at least 90%, or at least 95% identical to SEQ ID NO:74 and a light chain variable domain sequence that is at least 80%, at least 85%, at least 90%, or at least 95% identical to SEQ ID NO:381. The disclosure also provides antibodies comprising a heavy chain variable domain sequence that is at least 80%, at least 85%, at least 90%, or at least 95% identical to SEQ ID NO:75 and a light chain variable domain sequence that is at least 80%, at least 85%, at least 90%, or at least 95% identical to SEQ ID NO:427. The disclosure also provides antibodies comprising a heavy chain variable domain sequence that is at least 80%, at least 85%, at least 90%, or at least 95% identical to SEQ ID NO:75 and a light chain variable domain sequence that is at least 80%, at least 85%, at least 90%, or at least 95% identical to SEQ ID NO:428. The disclosure also provides antibodies comprising a heavy chain variable domain sequence that is at least 80%, at least 85%, at least 90%, or at least 95% identical to SEQ ID NO:76 and a light chain variable domain sequence that is at least 80%, at least 85%, at least 90%, or at least 95% identical to SEQ ID NO:385. The disclosure also provides antibodies comprising a heavy chain variable domain sequence that is at least 80%, at least 85%, at least 90%, or at least 95% identical to SEQ ID NO:77 and a light chain variable domain sequence that is at least 80%, at least 85%, at least 90%, or at least 95% identical to SEQ ID NO:381. The disclosure also provides antibodies comprising a heavy chain variable domain sequence that is at least 80%, at least 85%, at least 90%, or at least 95% identical to SEQ ID NO:78 and a light chain variable domain sequence that is at least 80%, at least 85%, at least 90%, or at least 95% identical to SEQ ID NO:381. The disclosure also provides antibodies comprising a heavy chain variable domain sequence that is at least 80%, at least 85%, at least 90%, or at least 95% identical to SEQ ID NO:79 and a light chain variable domain sequence that is at least 80%, at least 85%, at least 90%, or at least 95% identical to SEQ ID NO:429. The disclosure also provides antibodies comprising a heavy chain variable domain sequence that is at least 80%, at least 85%, at least 90%, or at least 95% identical to SEQ ID NO:80 and a light chain variable domain sequence that is at least 80%, at least 85%, at least 90%, or at least 95% identical to SEQ ID NO:430. The disclosure also provides antibodies comprising a heavy chain variable domain sequence that is at least 80%, at least 85%, at least 90%, or at least 95% identical to SEQ ID NO:67 and a light chain variable domain sequence that is at least 80%, at least 85%, at least 90%, or at least 95% identical to SEQ ID NO:381. The disclosure also provides antibodies comprising a heavy chain variable domain sequence that is at least 80%, at least 85%, at least 90%, or at least 95% identical to SEQ ID NO:81 and a light chain variable domain sequence that is at least 80%, at least 85%, at least 90%, or at least 95% identical to SEQ ID NO:431. The disclosure also provides antibodies comprising a heavy chain variable domain sequence that is at least 80%, at least 85%, at least 90%, or at least 95% identical to SEQ ID NO:82 and a light chain variable domain sequence that is at least 80%, at least 85%, at least 90%, or at least 95% identical to SEQ ID NO:432. The disclosure also provides antibodies comprising a heavy chain variable domain sequence that is at least 80%, at least 85%, at least 90%, or at least 95% identical to SEQ ID NO:83 and a light chain variable domain sequence that is at least 80%, at least 85%, at least 90%, or at least 95% identical to SEQ ID NO:381. The disclosure also provides antibodies comprising a heavy chain variable domain sequence that is at least 80%, at least 85%, at least 90%, or at least 95% identical to SEQ ID NO:84 and a light chain variable domain sequence that is at least 80%, at least 85%, at least 90%, or at least 95% identical to SEQ ID NO:381. The disclosure also provides antibodies comprising a heavy chain variable domain sequence that is at least 80%, at least 85%, at least 90%, or at least 95% identical to SEQ ID NO:85 and a light chain variable domain sequence that is at least 80%, at least 85%, at least 90%, or at least 95% identical to SEQ ID NO:433. The disclosure also provides antibodies comprising a heavy chain variable domain sequence that is at least 80%, at least 85%, at least 90%, or at least 95% identical to SEQ ID NO:79 and a light chain variable domain sequence that is at least 80%, at least 85%, at least 90%, or at least 95% identical to SEQ ID NO:434. The disclosure also provides antibodies comprising a heavy chain variable domain sequence that is at least 80%, at least 85%, at least 90%, or at least 95% identical to SEQ ID NO:86 and a light chain variable domain sequence that is at least 80%, at least 85%, at least 90%, or at least 95% identical to SEQ ID NO:435. The disclosure also provides antibodies comprising a heavy chain variable domain sequence that is at least 80%, at least 85%, at least 90%, or at least 95% identical to SEQ ID NO:87 and a light chain variable domain sequence that is at least 80%, at least 85%, at least 90%, or at least 95% identical to SEQ ID NO:436. The disclosure also provides antibodies comprising a heavy chain variable domain sequence that is at least 80%, at least 85%, at least 90%, or at least 95% identical to SEQ ID NO:88 and a light chain variable domain sequence that is at least 80%, at least 85%, at least 90%, or at least 95% identical to SEQ ID NO:437. The disclosure also provides antibodies comprising a heavy chain variable domain sequence that is at least 80%, at least 85%, at least 90%, or at least 95% identical to SEQ ID NO:89 and a light chain variable domain sequence that is at least 80%, at least 85%, at least 90%, or at least 95% identical to SEQ ID NO:438. The disclosure also provides antibodies comprising a heavy chain variable domain sequence that is at least 80%, at least 85%, at least 90%, or at least 95% identical to SEQ ID NO:90 and a light chain variable domain sequence that is at least 80%, at least 85%, at least 90%, or at least 95% identical to SEQ ID NO:439. The disclosure also provides antibodies comprising a heavy chain variable domain sequence that is at least 80%, at least 85%, at least 90%, or at least 95% identical to SEQ ID NO:91 and a light chain variable domain sequence that is at least 80%, at least 85%, at least 90%, or at least 95% identical to SEQ ID NO:440. The disclosure also provides antibodies comprising a heavy chain variable domain sequence that is at least 80%, at least 85%, at least 90%, or at least 95% identical to SEQ ID NO:92 and a light chain variable domain sequence that is at least 80%, at least 85%, at least 90%, or at least 95% identical to SEQ ID NO:381. The disclosure also provides antibodies comprising a heavy chain variable domain sequence that is at least 80%, at least 85%, at least 90%, or at least 95% identical to SEQ ID NO:93 and a light chain variable domain sequence that is at least 80%, at least 85%, at least 90%, or at least 95% identical to SEQ ID NO:381. The disclosure also provides antibodies comprising a heavy chain variable domain sequence that is at least 80%, at least 85%, at least 90%, or at least 95% identical to SEQ ID NO:94 and a light chain variable domain sequence that is at least 80%, at least 85%, at least 90%, or at least 95% identical to SEQ ID NO:381. The disclosure also provides antibodies comprising a heavy chain variable domain sequence that is at least 80%, at least 85%, at least 90%, or at least 95% identical to SEQ ID NO:62 and a light chain variable domain sequence that is at least 80%, at least 85%, at least 90%, or at least 95% identical to SEQ ID NO:441. The disclosure also provides antibodies comprising a heavy chain variable domain sequence that is at least 80%, at least 85%, at least 90%, or at least 95% identical to SEQ ID NO:95 and a light chain variable domain sequence that is at least 80%, at least 85%, at least 90%, or at least 95% identical to SEQ ID NO:398. The disclosure also provides antibodies comprising a heavy chain variable domain sequence that is at least 80%, at least 85%, at least 90%, or at least 95% identical to SEQ ID NO:96 and a light chain variable domain sequence that is at least 80%, at least 85%, at least 90%, or at least 95% identical to SEQ ID NO:442. The disclosure also provides antibodies comprising a heavy chain variable domain sequence that is at least 80%, at least 85%, at least 90%, or at least 95% identical to SEQ ID NO:84 and a light chain variable domain sequence that is at least 80%, at least 85%, at least 90%, or at least 95% identical to SEQ ID NO:443. The disclosure also provides antibodies comprising a heavy chain variable domain sequence that is at least 80%, at least 85%, at least 90%, or at least 95% identical to SEQ ID NO:97 and a light chain variable domain sequence that is at least 80%, at least 85%, at least 90%, or at least 95% identical to SEQ ID NO:381. The disclosure also provides antibodies comprising a heavy chain variable domain sequence that is at least 80%, at least 85%, at least 90%, or at least 95% identical to SEQ ID NO:98 and a light chain variable domain sequence that is at least 80%, at least 85%, at least 90%, or at least 95% identical to SEQ ID NO:444. The disclosure also provides antibodies comprising a heavy chain variable domain sequence that is at least 80%, at least 85%, at least 90%, or at least 95% identical to SEQ ID NO:99 and a light chain variable domain sequence that is at least 80%, at least 85%, at least 90%, or at least 95% identical to SEQ ID NO:381. The disclosure also provides antibodies comprising a heavy chain variable domain sequence that is at least 80%, at least 85%, at least 90%, or at least 95% identical to SEQ ID NO:100 and a light chain variable domain sequence that is at least 80%, at least 85%, at least 90%, or at least 95% identical to SEQ ID NO:381. The disclosure also provides antibodies comprising a heavy chain variable domain sequence that is at least 80%, at least 85%, at least 90%, or at least 95% identical to SEQ ID NO:7 and a light chain variable domain sequence that is at least 80%, at least 85%, at least 90%, or at least 95% identical to SEQ ID NO:381. The disclosure also provides antibodies comprising a heavy chain variable domain sequence that is at least 80%, at least 85%, at least 90%, or at least 95% identical to SEQ ID NO:101 and a light chain variable domain sequence that is at least 80%, at least 85%, at least 90%, or at least 95% identical to SEQ ID NO:381. The disclosure also provides antibodies comprising a heavy chain variable domain sequence that is at least 80%, at least 85%, at least 90%, or at least 95% identical to SEQ ID NO:102 and a light chain variable domain sequence that is at least 80%, at least 85%, at least 90%, or at least 95% identical to SEQ ID NO:445. The disclosure also provides antibodies comprising a heavy chain variable domain sequence that is at least 80%, at least 85%, at least 90%, or at least 95% identical to SEQ ID NO:27 and a light chain variable domain sequence that is at least 80%, at least 85%, at least 90%, or at least 95% identical to SEQ ID NO:446. The disclosure also provides antibodies comprising a heavy chain variable domain sequence that is at least 80%, at least 85%, at least 90%, or at least 95% identical to SEQ ID NO:103 and a light chain variable domain sequence that is at least 80%, at least 85%, at least 90%, or at least 95% identical to SEQ ID NO:447. The disclosure also provides antibodies comprising a heavy chain variable domain sequence that is at least 80%, at least 85%, at least 90%, or at least 95% identical to SEQ ID NO:84 and a light chain variable domain sequence that is at least 80%, at least 85%, at least 90%, or at least 95% identical to SEQ ID NO:385. The disclosure also provides antibodies comprising a heavy chain variable domain sequence that is at least 80%, at least 85%, at least 90%, or at least 95% identical to SEQ ID NO:104 and a light chain variable domain sequence that is at least 80%, at least 85%, at least 90%, or at least 95% identical to SEQ ID NO:382. The disclosure also provides antibodies comprising a heavy chain variable domain sequence that is at least 80%, at least 85%, at least 90%, or at least 95% identical to SEQ ID NO:7 and a light chain variable domain sequence that is at least 80%, at least 85%, at least 90%, or at least 95% identical to SEQ ID NO:448. The disclosure also provides antibodies comprising a heavy chain variable domain sequence that is at least 80%, at least 85%, at least 90%, or at least 95% identical to SEQ ID NO:105 and a light chain variable domain sequence that is at least 80%, at least 85%, at least 90%, or at least 95% identical to SEQ ID NO:404. The disclosure also provides antibodies comprising a heavy chain variable domain sequence that is at least 80%, at least 85%, at least 90%, or at least 95% identical to SEQ ID NO:106 and a light chain variable domain sequence that is at least 80%, at least 85%, at least 90%, or at least 95% identical to SEQ ID NO:410. The disclosure also provides antibodies comprising a heavy chain variable domain sequence that is at least 80%, at least 85%, at least 90%, or at least 95% identical to SEQ ID NO:107 and a light chain variable domain sequence that is at least 80%, at least 85%, at least 90%, or at least 95% identical to SEQ ID NO:381. The disclosure also provides antibodies comprising a heavy chain variable domain sequence that is at least 80%, at least 85%, at least 90%, or at least 95% identical to SEQ ID NO:108 and a light chain variable domain sequence that is at least 80%, at least 85%, at least 90%, or at least 95% identical to SEQ ID NO:381. The disclosure also provides antibodies comprising a heavy chain variable domain sequence that is at least 80%, at least 85%, at least 90%, or at least 95% identical to SEQ ID NO:109 and a light chain variable domain sequence that is at least 80%, at least 85%, at least 90%, or at least 95% identical to SEQ ID NO:381. The disclosure also provides antibodies comprising a heavy chain variable domain sequence that is at least 80%, at least 85%, at least 90%, or at least 95% identical to SEQ ID NO:110 and a light chain variable domain sequence that is at least 80%, at least 85%, at least 90%, or at least 95% identical to SEQ ID NO:449. The disclosure also provides antibodies comprising a heavy chain variable domain sequence that is at least 80%, at least 85%, at least 90%, or at least 95% identical to SEQ ID NO:111 and a light chain variable domain sequence that is at least 80%, at least 85%, at least 90%, or at least 95% identical to SEQ ID NO:450. The disclosure also provides antibodies comprising a heavy chain variable domain sequence that is at least 80%, at least 85%, at least 90%, or at least 95% identical to SEQ ID NO:27 and a light chain variable domain sequence that is at least 80%, at least 85%, at least 90%, or at least 95% identical to SEQ ID NO:451. The disclosure also provides antibodies comprising a heavy chain variable domain sequence that is at least 80%, at least 85%, at least 90%, or at least 95% identical to SEQ ID NO:112 and a light chain variable domain sequence that is at least 80%, at least 85%, at least 90%, or at least 95% identical to SEQ ID NO:452. The disclosure also provides antibodies comprising a heavy chain variable domain sequence that is at least 80%, at least 85%, at least 90%, or at least 95% identical to SEQ ID NO:113 and a light chain variable domain sequence that is at least 80%, at least 85%, at least 90%, or at least 95% identical to SEQ ID NO:385. The disclosure also provides antibodies comprising a heavy chain variable domain sequence that is at least 80%, at least 85%, at least 90%, or at least 95% identical to SEQ ID NO:114 and a light chain variable domain sequence that is at least 80%, at least 85%, at least 90%, or at least 95% identical to SEQ ID NO:453. The disclosure also provides antibodies comprising a heavy chain variable domain sequence that is at least 80%, at least 85%, at least 90%, or at least 95% identical to SEQ ID NO:115 and a light chain variable domain sequence that is at least 80%, at least 85%, at least 90%, or at least 95% identical to SEQ ID NO:454. The disclosure also provides antibodies comprising a heavy chain variable domain sequence that is at least 80%, at least 85%, at least 90%, or at least 95% identical to SEQ ID NO:116 and a light chain variable domain sequence that is at least 80%, at least 85%, at least 90%, or at least 95% identical to SEQ ID NO:381. The disclosure also provides antibodies comprising a heavy chain variable domain sequence that is at least 80%, at least 85%, at least 90%, or at least 95% identical to SEQ ID NO:117 and a light chain variable domain sequence that is at least 80%, at least 85%, at least 90%, or at least 95% identical to SEQ ID NO:385. The disclosure also provides antibodies comprising a heavy chain variable domain sequence that is at least 80%, at least 85%, at least 90%, or at least 95% identical to SEQ ID NO:17 and a light chain variable domain sequence that is at least 80%, at least 85%, at least 90%, or at least 95% identical to SEQ ID NO:455. The disclosure also provides antibodies comprising a heavy chain variable domain sequence that is at least 80%, at least 85%, at least 90%, or at least 95% identical to SEQ ID NO:23 and a light chain variable domain sequence that is at least 80%, at least 85%, at least 90%, or at least 95% identical to SEQ ID NO:456. The disclosure also provides antibodies comprising a heavy chain variable domain sequence that is at least 80%, at least 85%, at least 90%, or at least 95% identical to SEQ ID NO:118 and a light chain variable domain sequence that is at least 80%, at least 85%, at least 90%, or at least 95% identical to SEQ ID NO:456. The disclosure also provides antibodies comprising a heavy chain variable domain sequence that is at least 80%, at least 85%, at least 90%, or at least 95% identical to SEQ ID NO:119 and a light chain variable domain sequence that is at least 80%, at least 85%, at least 90%, or at least 95% identical to SEQ ID NO:398. The disclosure also provides antibodies comprising a heavy chain variable domain sequence that is at least 80%, at least 85%, at least 90%, or at least 95% identical to SEQ ID NO:120 and a light chain variable domain sequence that is at least 80%, at least 85%, at least 90%, or at least 95% identical to SEQ ID NO:381. The disclosure also provides antibodies comprising a heavy chain variable domain sequence that is at least 80%, at least 85%, at least 90%, or at least 95% identical to SEQ ID NO:121 and a light chain variable domain sequence that is at least 80%, at least 85%, at least 90%, or at least 95% identical to SEQ ID NO:381. The disclosure also provides antibodies comprising a heavy chain variable domain sequence that is at least 80%, at least 85%, at least 90%, or at least 95% identical to SEQ ID NO:84 and a light chain variable domain sequence that is at least 80%, at least 85%, at least 90%, or at least 95% identical to SEQ ID NO:457. The disclosure also provides antibodies comprising a heavy chain variable domain sequence that is at least 80%, at least 85%, at least 90%, or at least 95% identical to SEQ ID NO:122 and a light chain variable domain sequence that is at least 80%, at least 85%, at least 90%, or at least 95% identical to SEQ ID NO:458. The disclosure also provides antibodies comprising a heavy chain variable domain sequence that is at least 80%, at least 85%, at least 90%, or at least 95% identical to SEQ ID NO:123 and a light chain variable domain sequence that is at least 80%, at least 85%, at least 90%, or at least 95% identical to SEQ ID NO:406. The disclosure also provides antibodies comprising a heavy chain variable domain sequence that is at least 80%, at least 85%, at least 90%, or at least 95% identical to SEQ ID NO:93 and a light chain variable domain sequence that is at least 80%, at least 85%, at least 90%, or at least 95% identical to SEQ ID NO:451. The disclosure also provides antibodies comprising a heavy chain variable domain sequence that is at least 80%, at least 85%, at least 90%, or at least 95% identical to SEQ ID NO:58 and a light chain variable domain sequence that is at least 80%, at least 85%, at least 90%, or at least 95% identical to SEQ ID NO:389. The disclosure also provides antibodies comprising a heavy chain variable domain sequence that is at least 80%, at least 85%, at least 90%, or at least 95% identical to SEQ ID NO:124 and a light chain variable domain sequence that is at least 80%, at least 85%, at least 90%, or at least 95% identical to SEQ ID NO:381. The disclosure also provides antibodies comprising a heavy chain variable domain sequence that is at least 80%, at least 85%, at least 90%, or at least 95% identical to SEQ ID NO:17 and a light chain variable domain sequence that is at least 80%, at least 85%, at least 90%, or at least 95% identical to SEQ ID NO:451. The disclosure also provides antibodies comprising a heavy chain variable domain sequence that is at least 80%, at least 85%, at least 90%, or at least 95% identical to SEQ ID NO:125 and a light chain variable domain sequence that is at least 80%, at least 85%, at least 90%, or at least 95% identical to SEQ ID NO:381. The disclosure also provides antibodies comprising a heavy chain variable domain sequence that is at least 80%, at least 85%, at least 90%, or at least 95% identical to SEQ ID NO:27 and a light chain variable domain sequence that is at least 80%, at least 85%, at least 90%, or at least 95% identical to SEQ ID NO:445. The disclosure also provides antibodies comprising a heavy chain variable domain sequence that is at least 80%, at least 85%, at least 90%, or at least 95% identical to SEQ ID NO:126 and a light chain variable domain sequence that is at least 80%, at least 85%, at least 90%, or at least 95% identical to SEQ ID NO:381. The disclosure also provides antibodies comprising a heavy chain variable domain sequence that is at least 80%, at least 85%, at least 90%, or at least 95% identical to SEQ ID NO:127 and a light chain variable domain sequence that is at least 80%, at least 85%, at least 90%, or at least 95% identical to SEQ ID NO:459. The disclosure also provides antibodies comprising a heavy chain variable domain sequence that is at least 80%, at least 85%, at least 90%, or at least 95% identical to SEQ ID NO:7 and a light chain variable domain sequence that is at least 80%, at least 85%, at least 90%, or at least 95% identical to SEQ ID NO:460. The disclosure also provides antibodies comprising a heavy chain variable domain sequence that is at least 80%, at least 85%, at least 90%, or at least 95% identical to SEQ ID NO:7 and a light chain variable domain sequence that is at least 80%, at least 85%, at least 90%, or at least 95% identical to SEQ ID NO:398. The disclosure also provides antibodies comprising a heavy chain variable domain sequence that is at least 80%, at least 85%, at least 90%, or at least 95% identical to SEQ ID NO:128 and a light chain variable domain sequence that is at least 80%, at least 85%, at least 90%, or at least 95% identical to SEQ ID NO:461. The disclosure also provides antibodies comprising a heavy chain variable domain sequence that is at least 80%, at least 85%, at least 90%, or at least 95% identical to SEQ ID NO:129 and a light chain variable domain sequence that is at least 80%, at least 85%, at least 90%, or at least 95% identical to SEQ ID NO:381. The disclosure also provides antibodies comprising a heavy chain variable domain sequence that is at least 80%, at least 85%, at least 90%, or at least 95% identical to SEQ ID NO:130 and a light chain variable domain sequence that is at least 80%, at least 85%, at least 90%, or at least 95% identical to SEQ ID NO:462. The disclosure also provides antibodies comprising a heavy chain variable domain sequence that is at least 80%, at least 85%, at least 90%, or at least 95% identical to SEQ ID NO:84 and a light chain variable domain sequence that is at least 80%, at least 85%, at least 90%, or at least 95% identical to SEQ ID NO:398. The disclosure also provides antibodies comprising a heavy chain variable domain sequence that is at least 80%, at least 85%, at least 90%, or at least 95% identical to SEQ ID NO:131 and a light chain variable domain sequence that is at least 80%, at least 85%, at least 90%, or at least 95% identical to SEQ ID NO:381. The disclosure also provides antibodies comprising a heavy chain variable domain sequence that is at least 80%, at least 85%, at least 90%, or at least 95% identical to SEQ ID NO:132 and a light chain variable domain sequence that is at least 80%, at least 85%, at least 90%, or at least 95% identical to SEQ ID NO:381. The disclosure also provides antibodies comprising a heavy chain variable domain sequence that is at least 80%, at least 85%, at least 90%, or at least 95% identical to SEQ ID NO:133 and a light chain variable domain sequence that is at least 80%, at least 85%, at least 90%, or at least 95% identical to SEQ ID NO:381. The disclosure also provides antibodies comprising a heavy chain variable domain sequence that is at least 80%, at least 85%, at least 90%, or at least 95% identical to SEQ ID NO:67 and a light chain variable domain sequence that is at least 80%, at least 85%, at least 90%, or at least 95% identical to SEQ ID NO:382. The disclosure also provides antibodies comprising a heavy chain variable domain sequence that is at least 80%, at least 85%, at least 90%, or at least 95% identical to SEQ ID NO:134 and a light chain variable domain sequence that is at least 80%, at least 85%, at least 90%, or at least 95% identical to SEQ ID NO:396. The disclosure also provides antibodies comprising a heavy chain variable domain sequence that is at least 80%, at least 85%, at least 90%, or at least 95% identical to SEQ ID NO:51 and a light chain variable domain sequence that is at least 80%, at least 85%, at least 90%, or at least 95% identical to SEQ ID NO:381. The disclosure also provides antibodies comprising a heavy chain variable domain sequence that is at least 80%, at least 85%, at least 90%, or at least 95% identical to SEQ ID NO:51 and a light chain variable domain sequence that is at least 80%, at least 85%, at least 90%, or at least 95% identical to SEQ ID NO:463. The disclosure also provides antibodies comprising a heavy chain variable domain sequence that is at least 80%, at least 85%, at least 90%, or at least 95% identical to SEQ ID NO:135 and a light chain variable domain sequence that is at least 80%, at least 85%, at least 90%, or at least 95% identical to SEQ ID NO:381. The disclosure also provides antibodies comprising a heavy chain variable domain sequence that is at least 80%, at least 85%, at least 90%, or at least 95% identical to SEQ ID NO:102 and a light chain variable domain sequence that is at least 80%, at least 85%, at least 90%, or at least 95% identical to SEQ ID NO:381. The disclosure also provides antibodies comprising a heavy chain variable domain sequence that is at least 80%, at least 85%, at least 90%, or at least 95% identical to SEQ ID NO:136 and a light chain variable domain sequence that is at least 80%, at least 85%, at least 90%, or at least 95% identical to SEQ ID NO:381. The disclosure also provides antibodies comprising a heavy chain variable domain sequence that is at least 80%, at least 85%, at least 90%, or at least 95% identical to SEQ ID NO:137 and a light chain variable domain sequence that is at least 80%, at least 85%, at least 90%, or at least 95% identical to SEQ ID NO:398. The disclosure also provides antibodies comprising a heavy chain variable domain sequence that is at least 80%, at least 85%, at least 90%, or at least 95% identical to SEQ ID NO:138 and a light chain variable domain sequence that is at least 80%, at least 85%, at least 90%, or at least 95% identical to SEQ ID NO:462. The disclosure also provides antibodies comprising a heavy chain variable domain sequence that is at least 80%, at least 85%, at least 90%, or at least 95% identical to SEQ ID NO:139 and a light chain variable domain sequence that is at least 80%, at least 85%, at least 90%, or at least 95% identical to SEQ ID NO:464. The disclosure also provides antibodies comprising a heavy chain variable domain sequence that is at least 80%, at least 85%, at least 90%, or at least 95% identical to SEQ ID NO:140 and a light chain variable domain sequence that is at least 80%, at least 85%, at least 90%, or at least 95% identical to SEQ ID NO:465. The disclosure also provides antibodies comprising a heavy chain variable domain sequence that is at least 80%, at least 85%, at least 90%, or at least 95% identical to SEQ ID NO:141 and a light chain variable domain sequence that is at least 80%, at least 85%, at least 90%, or at least 95% identical to SEQ ID NO:466. The disclosure also provides antibodies comprising a heavy chain variable domain sequence that is at least 80%, at least 85%, at least 90%, or at least 95% identical to SEQ ID NO:142 and a light chain variable domain sequence that is at least 80%, at least 85%, at least 90%, or at least 95% identical to SEQ ID NO:467. The disclosure also provides antibodies comprising a heavy chain variable domain sequence that is at least 80%, at least 85%, at least 90%, or at least 95% identical to SEQ ID NO:143 and a light chain variable domain sequence that is at least 80%, at least 85%, at least 90%, or at least 95% identical to SEQ ID NO:468. The disclosure also provides antibodies comprising a heavy chain variable domain sequence that is at least 80%, at least 85%, at least 90%, or at least 95% identical to SEQ ID NO:144 and a light chain variable domain sequence that is at least 80%, at least 85%, at least 90%, or at least 95% identical to SEQ ID NO:469. The disclosure also provides antibodies comprising a heavy chain variable domain sequence that is at least 80%, at least 85%, at least 90%, or at least 95% identical to SEQ ID NO:145 and a light chain variable domain sequence that is at least 80%, at least 85%, at least 90%, or at least 95% identical to SEQ ID NO:470. The disclosure also provides antibodies comprising a heavy chain variable domain sequence that is at least 80%, at least 85%, at least 90%, or at least 95% identical to SEQ ID NO:146 and a light chain variable domain sequence that is at least 80%, at least 85%, at least 90%, or at least 95% identical to SEQ ID NO:471. The disclosure also provides antibodies comprising a heavy chain variable domain sequence that is at least 80%, at least 85%, at least 90%, or at least 95% identical to SEQ ID NO:147 and a light chain variable domain sequence that is at least 80%, at least 85%, at least 90%, or at least 95% identical to SEQ ID NO:472. The disclosure also provides antibodies comprising a heavy chain variable domain sequence that is at least 80%, at least 85%, at least 90%, or at least 95% identical to SEQ ID NO:148 and a light chain variable domain sequence that is at least 80%, at least 85%, at least 90%, or at least 95% identical to SEQ ID NO:473. The disclosure also provides antibodies comprising a heavy chain variable domain sequence that is at least 80%, at least 85%, at least 90%, or at least 95% identical to SEQ ID NO:149 and a light chain variable domain sequence that is at least 80%, at least 85%, at least 90%, or at least 95% identical to SEQ ID NO:474. The disclosure also provides antibodies comprising a heavy chain variable domain sequence that is at least 80%, at least 85%, at least 90%, or at least 95% identical to SEQ ID NO:150 and a light chain variable domain sequence that is at least 80%, at least 85%, at least 90%, or at least 95% identical to SEQ ID NO:475. The disclosure also provides antibodies comprising a heavy chain variable domain sequence that is at least 80%, at least 85%, at least 90%, or at least 95% identical to SEQ ID NO:151 and a light chain variable domain sequence that is at least 80%, at least 85%, at least 90%, or at least 95% identical to SEQ ID NO:476. The disclosure also provides antibodies comprising a heavy chain variable domain sequence that is at least 80%, at least 85%, at least 90%, or at least 95% identical to SEQ ID NO:152 and a light chain variable domain sequence that is at least 80%, at least 85%, at least 90%, or at least 95% identical to SEQ ID NO:477. The disclosure also provides antibodies comprising a heavy chain variable domain sequence that is at least 80%, at least 85%, at least 90%, or at least 95% identical to SEQ ID NO:153 and a light chain variable domain sequence that is at least 80%, at least 85%, at least 90%, or at least 95% identical to SEQ ID NO:478. The disclosure also provides antibodies comprising a heavy chain variable domain sequence that is at least 80%, at least 85%, at least 90%, or at least 95% identical to SEQ ID NO:154 and a light chain variable domain sequence that is at least 80%, at least 85%, at least 90%, or at least 95% identical to SEQ ID NO:479. The disclosure also provides antibodies comprising a heavy chain variable domain sequence that is at least 80%, at least 85%, at least 90%, or at least 95% identical to SEQ ID NO:155 and a light chain variable domain sequence that is at least 80%, at least 85%, at least 90%, or at least 95% identical to SEQ ID NO:480. The disclosure also provides antibodies comprising a heavy chain variable domain sequence that is at least 80%, at least 85%, at least 90%, or at least 95% identical to SEQ ID NO:156 and a light chain variable domain sequence that is at least 80%, at least 85%, at least 90%, or at least 95% identical to SEQ ID NO:481. The disclosure also provides antibodies comprising a heavy chain variable domain sequence that is at least 80%, at least 85%, at least 90%, or at least 95% identical to SEQ ID NO:157 and a light chain variable domain sequence that is at least 80%, at least 85%, at least 90%, or at least 95% identical to SEQ ID NO:482. The disclosure also provides antibodies comprising a heavy chain variable domain sequence that is at least 80%, at least 85%, at least 90%, or at least 95% identical to SEQ ID NO:158 and a light chain variable domain sequence that is at least 80%, at least 85%, at least 90%, or at least 95% identical to SEQ ID NO:483. The disclosure also provides antibodies comprising a heavy chain variable domain sequence that is at least 80%, at least 85%, at least 90%, or at least 95% identical to SEQ ID NO:159 and a light chain variable domain sequence that is at least 80%, at least 85%, at least 90%, or at least 95% identical to SEQ ID NO:484. The disclosure also provides antibodies comprising a heavy chain variable domain sequence that is at least 80%, at least 85%, at least 90%, or at least 95% identical to SEQ ID NO:160 and a light chain variable domain sequence that is at least 80%, at least 85%, at least 90%, or at least 95% identical to SEQ ID NO:485. The disclosure also provides antibodies comprising a heavy chain variable domain sequence that is at least 80%, at least 85%, at least 90%, or at least 95% identical to SEQ ID NO:161 and a light chain variable domain sequence that is at least 80%, at least 85%, at least 90%, or at least 95% identical to SEQ ID NO:486. The disclosure also provides antibodies comprising a heavy chain variable domain sequence that is at least 80%, at least 85%, at least 90%, or at least 95% identical to SEQ ID NO:162 and a light chain variable domain sequence that is at least 80%, at least 85%, at least 90%, or at least 95% identical to SEQ ID NO:487. The disclosure also provides antibodies comprising a heavy chain variable domain sequence that is at least 80%, at least 85%, at least 90%, or at least 95% identical to SEQ ID NO:163 and a light chain variable domain sequence that is at least 80%, at least 85%, at least 90%, or at least 95% identical to SEQ ID NO:488. The disclosure also provides antibodies comprising a heavy chain variable domain sequence that is at least 80%, at least 85%, at least 90%, or at least 95% identical to SEQ ID NO:164 and a light chain variable domain sequence that is at least 80%, at least 85%, at least 90%, or at least 95% identical to SEQ ID NO:489. The disclosure also provides antibodies comprising a heavy chain variable domain sequence that is at least 80%, at least 85%, at least 90%, or at least 95% identical to SEQ ID NO:165 and a light chain variable domain sequence that is at least 80%, at least 85%, at least 90%, or at least 95% identical to SEQ ID NO:490. The disclosure also provides antibodies comprising a heavy chain variable domain sequence that is at least 80%, at least 85%, at least 90%, or at least 95% identical to SEQ ID NO:166 and a light chain variable domain sequence that is at least 80%, at least 85%, at least 90%, or at least 95% identical to SEQ ID NO:474. The disclosure also provides antibodies comprising a heavy chain variable domain sequence that is at least 80%, at least 85%, at least 90%, or at least 95% identical to SEQ ID NO:167 and a light chain variable domain sequence that is at least 80%, at least 85%, at least 90%, or at least 95% identical to SEQ ID NO:491. The disclosure also provides antibodies comprising a heavy chain variable domain sequence that is at least 80%, at least 85%, at least 90%, or at least 95% identical to SEQ ID NO:168 and a light chain variable domain sequence that is at least 80%, at least 85%, at least 90%, or at least 95% identical to SEQ ID NO:492. The disclosure also provides antibodies comprising a heavy chain variable domain sequence that is at least 80%, at least 85%, at least 90%, or at least 95% identical to SEQ ID NO:169 and a light chain variable domain sequence that is at least 80%, at least 85%, at least 90%, or at least 95% identical to SEQ ID NO:493. The disclosure also provides antibodies comprising a heavy chain variable domain sequence that is at least 80%, at least 85%, at least 90%, or at least 95% identical to SEQ ID NO:170 and a light chain variable domain sequence that is at least 80%, at least 85%, at least 90%, or at least 95% identical to SEQ ID NO:494. The disclosure also provides antibodies comprising a heavy chain variable domain sequence that is at least 80%, at least 85%, at least 90%, or at least 95% identical to SEQ ID NO:171 and a light chain variable domain sequence that is at least 80%, at least 85%, at least 90%, or at least 95% identical to SEQ ID NO:495. The disclosure also provides antibodies comprising a heavy chain variable domain sequence that is at least 80%, at least 85%, at least 90%, or at least 95% identical to SEQ ID NO:172 and a light chain variable domain sequence that is at least 80%, at least 85%, at least 90%, or at least 95% identical to SEQ ID NO:496. The disclosure also provides antibodies comprising a heavy chain variable domain sequence that is at least 80%, at least 85%, at least 90%, or at least 95% identical to SEQ ID NO:173 and a light chain variable domain sequence that is at least 80%, at least 85%, at least 90%, or at least 95% identical to SEQ ID NO:497. The disclosure also provides antibodies comprising a heavy chain variable domain sequence that is at least 80%, at least 85%, at least 90%, or at least 95% identical to SEQ ID NO:174 and a light chain variable domain sequence that is at least 80%, at least 85%, at least 90%, or at least 95% identical to SEQ ID NO:498. The disclosure also provides antibodies comprising a heavy chain variable domain sequence that is at least 80%, at least 85%, at least 90%, or at least 95% identical to SEQ ID NO:175 and a light chain variable domain sequence that is at least 80%, at least 85%, at least 90%, or at least 95% identical to SEQ ID NO:486. The disclosure also provides antibodies comprising a heavy chain variable domain sequence that is at least 80%, at least 85%, at least 90%, or at least 95% identical to SEQ ID NO:176 and a light chain variable domain sequence that is at least 80%, at least 85%, at least 90%, or at least 95% identical to SEQ ID NO:499. The disclosure also provides antibodies comprising a heavy chain variable domain sequence that is at least 80%, at least 85%, at least 90%, or at least 95% identical to SEQ ID NO:177 and a light chain variable domain sequence that is at least 80%, at least 85%, at least 90%, or at least 95% identical to SEQ ID NO:500. The disclosure also provides antibodies comprising a heavy chain variable domain sequence that is at least 80%, at least 85%, at least 90%, or at least 95% identical to SEQ ID NO:178 and a light chain variable domain sequence that is at least 80%, at least 85%, at least 90%, or at least 95% identical to SEQ ID NO:479. The disclosure also provides antibodies comprising a heavy chain variable domain sequence that is at least 80%, at least 85%, at least 90%, or at least 95% identical to SEQ ID NO:179 and a light chain variable domain sequence that is at least 80%, at least 85%, at least 90%, or at least 95% identical to SEQ ID NO:501. The disclosure also provides antibodies comprising a heavy chain variable domain sequence that is at least 80%, at least 85%, at least 90%, or at least 95% identical to SEQ ID NO:180 and a light chain variable domain sequence that is at least 80%, at least 85%, at least 90%, or at least 95% identical to SEQ ID NO:502. The disclosure also provides antibodies comprising a heavy chain variable domain sequence that is at least 80%, at least 85%, at least 90%, or at least 95% identical to SEQ ID NO:181 and a light chain variable domain sequence that is at least 80%, at least 85%, at least 90%, or at least 95% identical to SEQ ID NO:503. The disclosure also provides antibodies comprising a heavy chain variable domain sequence that is at least 80%, at least 85%, at least 90%, or at least 95% identical to SEQ ID NO:182 and a light chain variable domain sequence that is at least 80%, at least 85%, at least 90%, or at least 95% identical to SEQ ID NO:504. The disclosure also provides antibodies comprising a heavy chain variable domain sequence that is at least 80%, at least 85%, at least 90%, or at least 95% identical to SEQ ID NO:183 and a light chain variable domain sequence that is at least 80%, at least 85%, at least 90%, or at least 95% identical to SEQ ID NO:505. The disclosure also provides antibodies comprising a heavy chain variable domain sequence that is at least 80%, at least 85%, at least 90%, or at least 95% identical to SEQ ID NO:184 and a light chain variable domain sequence that is at least 80%, at least 85%, at least 90%, or at least 95% identical to SEQ ID NO:506. The disclosure also provides antibodies comprising a heavy chain variable domain sequence that is at least 80%, at least 85%, at least 90%, or at least 95% identical to SEQ ID NO:185 and a light chain variable domain sequence that is at least 80%, at least 85%, at least 90%, or at least 95% identical to SEQ ID NO:507. The disclosure also provides antibodies comprising a heavy chain variable domain sequence that is at least 80%, at least 85%, at least 90%, or at least 95% identical to SEQ ID NO:186 and a light chain variable domain sequence that is at least 80%, at least 85%, at least 90%, or at least 95% identical to SEQ ID NO:469. The disclosure also provides antibodies comprising a heavy chain variable domain sequence that is at least 80%, at least 85%, at least 90%, or at least 95% identical to SEQ ID NO:181 and a light chain variable domain sequence that is at least 80%, at least 85%, at least 90%, or at least 95% identical to SEQ ID NO:508. The disclosure also provides antibodies comprising a heavy chain variable domain sequence that is at least 80%, at least 85%, at least 90%, or at least 95% identical to SEQ ID NO:187 and a light chain variable domain sequence that is at least 80%, at least 85%, at least 90%, or at least 95% identical to SEQ ID NO:509. The disclosure also provides antibodies comprising a heavy chain variable domain sequence that is at least 80%, at least 85%, at least 90%, or at least 95% identical to SEQ ID NO:188 and a light chain variable domain sequence that is at least 80%, at least 85%, at least 90%, or at least 95% identical to SEQ ID NO:510. The disclosure also provides antibodies comprising a heavy chain variable domain sequence that is at least 80%, at least 85%, at least 90%, or at least 95% identical to SEQ ID NO:189 and a light chain variable domain sequence that is at least 80%, at least 85%, at least 90%, or at least 95% identical to SEQ ID NO:511. The disclosure also provides antibodies comprising a heavy chain variable domain sequence that is at least 80%, at least 85%, at least 90%, or at least 95% identical to SEQ ID NO:190 and a light chain variable domain sequence that is at least 80%, at least 85%, at least 90%, or at least 95% identical to SEQ ID NO:512. The disclosure also provides antibodies comprising a heavy chain variable domain sequence that is at least 80%, at least 85%, at least 90%, or at least 95% identical to SEQ ID NO:191 and a light chain variable domain sequence that is at least 80%, at least 85%, at least 90%, or at least 95% identical to SEQ ID NO:513. The disclosure also provides antibodies comprising a heavy chain variable domain sequence that is at least 80%, at least 85%, at least 90%, or at least 95% identical to SEQ ID NO:192 and a light chain variable domain sequence that is at least 80%, at least 85%, at least 90%, or at least 95% identical to SEQ ID NO:514. The disclosure also provides antibodies comprising a heavy chain variable domain sequence that is at least 80%, at least 85%, at least 90%, or at least 95% identical to SEQ ID NO:193 and a light chain variable domain sequence that is at least 80%, at least 85%, at least 90%, or at least 95% identical to SEQ ID NO:515. The disclosure also provides antibodies comprising a heavy chain variable domain sequence that is at least 80%, at least 85%, at least 90%, or at least 95% identical to SEQ ID NO:194 and a light chain variable domain sequence that is at least 80%, at least 85%, at least 90%, or at least 95% identical to SEQ ID NO:516. The disclosure also provides antibodies comprising a heavy chain variable domain sequence that is at least 80%, at least 85%, at least 90%, or at least 95% identical to SEQ ID NO:177 and a light chain variable domain sequence that is at least 80%, at least 85%, at least 90%, or at least 95% identical to SEQ ID NO:517. The disclosure also provides antibodies comprising a heavy chain variable domain sequence that is at least 80%, at least 85%, at least 90%, or at least 95% identical to SEQ ID NO:140 and a light chain variable domain sequence that is at least 80%, at least 85%, at least 90%, or at least 95% identical to SEQ ID NO:518. The disclosure also provides antibodies comprising a heavy chain variable domain sequence that is at least 80%, at least 85%, at least 90%, or at least 95% identical to SEQ ID NO:195 and a light chain variable domain sequence that is at least 80%, at least 85%, at least 90%, or at least 95% identical to SEQ ID NO:519. The disclosure also provides antibodies comprising a heavy chain variable domain sequence that is at least 80%, at least 85%, at least 90%, or at least 95% identical to SEQ ID NO:196 and a light chain variable domain sequence that is at least 80%, at least 85%, at least 90%, or at least 95% identical to SEQ ID NO:520. The disclosure also provides antibodies comprising a heavy chain variable domain sequence that is at least 80%, at least 85%, at least 90%, or at least 95% identical to SEQ ID NO:171 and a light chain variable domain sequence that is at least 80%, at least 85%, at least 90%, or at least 95% identical to SEQ ID NO:521. The disclosure also provides antibodies comprising a heavy chain variable domain sequence that is at least 80%, at least 85%, at least 90%, or at least 95% identical to SEQ ID NO:197 and a light chain variable domain sequence that is at least 80%, at least 85%, at least 90%, or at least 95% identical to SEQ ID NO:522. The disclosure also provides antibodies comprising a heavy chain variable domain sequence that is at least 80%, at least 85%, at least 90%, or at least 95% identical to SEQ ID NO:198 and a light chain variable domain sequence that is at least 80%, at least 85%, at least 90%, or at least 95% identical to SEQ ID NO:523. The disclosure also provides antibodies comprising a heavy chain variable domain sequence that is at least 80%, at least 85%, at least 90%, or at least 95% identical to SEQ ID NO:170 and a light chain variable domain sequence that is at least 80%, at least 85%, at least 90%, or at least 95% identical to SEQ ID NO:524. The disclosure also provides antibodies comprising a heavy chain variable domain sequence that is at least 80%, at least 85%, at least 90%, or at least 95% identical to SEQ ID NO:199 and a light chain variable domain sequence that is at least 80%, at least 85%, at least 90%, or at least 95% identical to SEQ ID NO:525. The disclosure also provides antibodies comprising a heavy chain variable domain sequence that is at least 80%, at least 85%, at least 90%, or at least 95% identical to SEQ ID NO:200 and a light chain variable domain sequence that is at least 80%, at least 85%, at least 90%, or at least 95% identical to SEQ ID NO:526. The disclosure also provides antibodies comprising a heavy chain variable domain sequence that is at least 80%, at least 85%, at least 90%, or at least 95% identical to SEQ ID NO:201 and a light chain variable domain sequence that is at least 80%, at least 85%, at least 90%, or at least 95% identical to SEQ ID NO:527. The disclosure also provides antibodies comprising a heavy chain variable domain sequence that is at least 80%, at least 85%, at least 90%, or at least 95% identical to SEQ ID NO:202 and a light chain variable domain sequence that is at least 80%, at least 85%, at least 90%, or at least 95% identical to SEQ ID NO:528. The disclosure also provides antibodies comprising a heavy chain variable domain sequence that is at least 80%, at least 85%, at least 90%, or at least 95% identical to SEQ ID NO:203 and a light chain variable domain sequence that is at least 80%, at least 85%, at least 90%, or at least 95% identical to SEQ ID NO:529. The disclosure also provides antibodies comprising a heavy chain variable domain sequence that is at least 80%, at least 85%, at least 90%, or at least 95% identical to SEQ ID NO:204 and a light chain variable domain sequence that is at least 80%, at least 85%, at least 90%, or at least 95% identical to SEQ ID NO:530. The disclosure also provides antibodies comprising a heavy chain variable domain sequence that is at least 80%, at least 85%, at least 90%, or at least 95% identical to SEQ ID NO:205 and a light chain variable domain sequence that is at least 80%, at least 85%, at least 90%, or at least 95% identical to SEQ ID NO:531. The disclosure also provides antibodies comprising a heavy chain variable domain sequence that is at least 80%, at least 85%, at least 90%, or at least 95% identical to SEQ ID NO:206 and a light chain variable domain sequence that is at least 80%, at least 85%, at least 90%, or at least 95% identical to SEQ ID NO:532. The disclosure also provides antibodies comprising a heavy chain variable domain sequence that is at least 80%, at least 85%, at least 90%, or at least 95% identical to SEQ ID NO:207 and a light chain variable domain sequence that is at least 80%, at least 85%, at least 90%, or at least 95% identical to SEQ ID NO:533. The disclosure also provides antibodies comprising a heavy chain variable domain sequence that is at least 80%, at least 85%, at least 90%, or at least 95% identical to SEQ ID NO:208 and a light chain variable domain sequence that is at least 80%, at least 85%, at least 90%, or at least 95% identical to SEQ ID NO:534. The disclosure also provides antibodies comprising a heavy chain variable domain sequence that is at least 80%, at least 85%, at least 90%, or at least 95% identical to SEQ ID NO:209 and a light chain variable domain sequence that is at least 80%, at least 85%, at least 90%, or at least 95% identical to SEQ ID NO:535. The disclosure also provides antibodies comprising a heavy chain variable domain sequence that is at least 80%, at least 85%, at least 90%, or at least 95% identical to SEQ ID NO:210 and a light chain variable domain sequence that is at least 80%, at least 85%, at least 90%, or at least 95% identical to SEQ ID NO:536. The disclosure also provides antibodies comprising a heavy chain variable domain sequence that is at least 80%, at least 85%, at least 90%, or at least 95% identical to SEQ ID NO:211 and a light chain variable domain sequence that is at least 80%, at least 85%, at least 90%, or at least 95% identical to SEQ ID NO:537. The disclosure also provides antibodies comprising a heavy chain variable domain sequence that is at least 80%, at least 85%, at least 90%, or at least 95% identical to SEQ ID NO:171 and a light chain variable domain sequence that is at least 80%, at least 85%, at least 90%, or at least 95% identical to SEQ ID NO:538. The disclosure also provides antibodies comprising a heavy chain variable domain sequence that is at least 80%, at least 85%, at least 90%, or at least 95% identical to SEQ ID NO:212 and a light chain variable domain sequence that is at least 80%, at least 85%, at least 90%, or at least 95% identical to SEQ ID NO:539. The disclosure also provides antibodies comprising a heavy chain variable domain sequence that is at least 80%, at least 85%, at least 90%, or at least 95% identical to SEQ ID NO:213 and a light chain variable domain sequence that is at least 80%, at least 85%, at least 90%, or at least 95% identical to SEQ ID NO:540. The disclosure also provides antibodies comprising a heavy chain variable domain sequence that is at least 80%, at least 85%, at least 90%, or at least 95% identical to SEQ ID NO:214 and a light chain variable domain sequence that is at least 80%, at least 85%, at least 90%, or at least 95% identical to SEQ ID NO:541. The disclosure also provides antibodies comprising a heavy chain variable domain sequence that is at least 80%, at least 85%, at least 90%, or at least 95% identical to SEQ ID NO:182 and a light chain variable domain sequence that is at least 80%, at least 85%, at least 90%, or at least 95% identical to SEQ ID NO:542. The disclosure also provides antibodies comprising a heavy chain variable domain sequence that is at least 80%, at least 85%, at least 90%, or at least 95% identical to SEQ ID NO:215 and a light chain variable domain sequence that is at least 80%, at least 85%, at least 90%, or at least 95% identical to SEQ ID NO:515. The disclosure also provides antibodies comprising a heavy chain variable domain sequence that is at least 80%, at least 85%, at least 90%, or at least 95% identical to SEQ ID NO:201 and a light chain variable domain sequence that is at least 80%, at least 85%, at least 90%, or at least 95% identical to SEQ ID NO:543. The disclosure also provides antibodies comprising a heavy chain variable domain sequence that is at least 80%, at least 85%, at least 90%, or at least 95% identical to SEQ ID NO:216 and a light chain variable domain sequence that is at least 80%, at least 85%, at least 90%, or at least 95% identical to SEQ ID NO:527. The disclosure also provides antibodies comprising a heavy chain variable domain sequence that is at least 80%, at least 85%, at least 90%, or at least 95% identical to SEQ ID NO:217 and a light chain variable domain sequence that is at least 80%, at least 85%, at least 90%, or at least 95% identical to SEQ ID NO:544. The disclosure also provides antibodies comprising a heavy chain variable domain sequence that is at least 80%, at least 85%, at least 90%, or at least 95% identical to SEQ ID NO:218 and a light chain variable domain sequence that is at least 80%, at least 85%, at least 90%, or at least 95% identical to SEQ ID NO:482. The disclosure also provides antibodies comprising a heavy chain variable domain sequence that is at least 80%, at least 85%, at least 90%, or at least 95% identical to SEQ ID NO:219 and a light chain variable domain sequence that is at least 80%, at least 85%, at least 90%, or at least 95% identical to SEQ ID NO:545. The disclosure also provides antibodies comprising a heavy chain variable domain sequence that is at least 80%, at least 85%, at least 90%, or at least 95% identical to SEQ ID NO:220 and a light chain variable domain sequence that is at least 80%, at least 85%, at least 90%, or at least 95% identical to SEQ ID NO:546. The disclosure also provides antibodies comprising a heavy chain variable domain sequence that is at least 80%, at least 85%, at least 90%, or at least 95% identical to SEQ ID NO:221 and a light chain variable domain sequence that is at least 80%, at least 85%, at least 90%, or at least 95% identical to SEQ ID NO:547. The disclosure also provides antibodies comprising a heavy chain variable domain sequence that is at least 80%, at least 85%, at least 90%, or at least 95% identical to SEQ ID NO:183 and a light chain variable domain sequence that is at least 80%, at least 85%, at least 90%, or at least 95% identical to SEQ ID NO:548. The disclosure also provides antibodies comprising a heavy chain variable domain sequence that is at least 80%, at least 85%, at least 90%, or at least 95% identical to SEQ ID NO:222 and a light chain variable domain sequence that is at least 80%, at least 85%, at least 90%, or at least 95% identical to SEQ ID NO:469. The disclosure also provides antibodies comprising a heavy chain variable domain sequence that is at least 80%, at least 85%, at least 90%, or at least 95% identical to SEQ ID NO:223 and a light chain variable domain sequence that is at least 80%, at least 85%, at least 90%, or at least 95% identical to SEQ ID NO:549. The disclosure also provides antibodies comprising a heavy chain variable domain sequence that is at least 80%, at least 85%, at least 90%, or at least 95% identical to SEQ ID NO:224 and a light chain variable domain sequence that is at least 80%, at least 85%, at least 90%, or at least 95% identical to SEQ ID NO:550. The disclosure also provides antibodies comprising a heavy chain variable domain sequence that is at least 80%, at least 85%, at least 90%, or at least 95% identical to SEQ ID NO:225 and a light chain variable domain sequence that is at least 80%, at least 85%, at least 90%, or at least 95% identical to SEQ ID NO:551. The disclosure also provides antibodies comprising a heavy chain variable domain sequence that is at least 80%, at least 85%, at least 90%, or at least 95% identical to SEQ ID NO:226 and a light chain variable domain sequence that is at least 80%, at least 85%, at least 90%, or at least 95% identical to SEQ ID NO:552. The disclosure also provides antibodies comprising a heavy chain variable domain sequence that is at least 80%, at least 85%, at least 90%, or at least 95% identical to SEQ ID NO:227 and a light chain variable domain sequence that is at least 80%, at least 85%, at least 90%, or at least 95% identical to SEQ ID NO:529. The disclosure also provides antibodies comprising a heavy chain variable domain sequence that is at least 80%, at least 85%, at least 90%, or at least 95% identical to SEQ ID NO:151 and a light chain variable domain sequence that is at least 80%, at least 85%, at least 90%, or at least 95% identical to SEQ ID NO:553. The disclosure also provides antibodies comprising a heavy chain variable domain sequence that is at least 80%, at least 85%, at least 90%, or at least 95% identical to SEQ ID NO:228 and a light chain variable domain sequence that is at least 80%, at least 85%, at least 90%, or at least 95% identical to SEQ ID NO:554. The disclosure also provides antibodies comprising a heavy chain variable domain sequence that is at least 80%, at least 85%, at least 90%, or at least 95% identical to SEQ ID NO:229 and a light chain variable domain sequence that is at least 80%, at least 85%, at least 90%, or at least 95% identical to SEQ ID NO:555. The disclosure also provides antibodies comprising a heavy chain variable domain sequence that is at least 80%, at least 85%, at least 90%, or at least 95% identical to SEQ ID NO:201 and a light chain variable domain sequence that is at least 80%, at least 85%, at least 90%, or at least 95% identical to SEQ ID NO:552. The disclosure also provides antibodies comprising a heavy chain variable domain sequence that is at least 80%, at least 85%, at least 90%, or at least 95% identical to SEQ ID NO:230 and a light chain variable domain sequence that is at least 80%, at least 85%, at least 90%, or at least 95% identical to SEQ ID NO:556. The disclosure also provides antibodies comprising a heavy chain variable domain sequence that is at least 80%, at least 85%, at least 90%, or at least 95% identical to SEQ ID NO:231 and a light chain variable domain sequence that is at least 80%, at least 85%, at least 90%, or at least 95% identical to SEQ ID NO:557. The disclosure also provides antibodies comprising a heavy chain variable domain sequence that is at least 80%, at least 85%, at least 90%, or at least 95% identical to SEQ ID NO:163 and a light chain variable domain sequence that is at least 80%, at least 85%, at least 90%, or at least 95% identical to SEQ ID NO:558. The disclosure also provides antibodies comprising a heavy chain variable domain sequence that is at least 80%, at least 85%, at least 90%, or at least 95% identical to SEQ ID NO:232 and a light chain variable domain sequence that is at least 80%, at least 85%, at least 90%, or at least 95% identical to SEQ ID NO:559. The disclosure also provides antibodies comprising a heavy chain variable domain sequence that is at least 80%, at least 85%, at least 90%, or at least 95% identical to SEQ ID NO:233 and a light chain variable domain sequence that is at least 80%, at least 85%, at least 90%, or at least 95% identical to SEQ ID NO:466. The disclosure also provides antibodies comprising a heavy chain variable domain sequence that is at least 80%, at least 85%, at least 90%, or at least 95% identical to SEQ ID NO:234 and a light chain variable domain sequence that is at least 80%, at least 85%, at least 90%, or at least 95% identical to SEQ ID NO:560. The disclosure also provides antibodies comprising a heavy chain variable domain sequence that is at least 80%, at least 85%, at least 90%, or at least 95% identical to SEQ ID NO:235 and a light chain variable domain sequence that is at least 80%, at least 85%, at least 90%, or at least 95% identical to SEQ ID NO:561. The disclosure also provides antibodies comprising a heavy chain variable domain sequence that is at least 80%, at least 85%, at least 90%, or at least 95% identical to SEQ ID NO:236 and a light chain variable domain sequence that is at least 80%, at least 85%, at least 90%, or at least 95% identical to SEQ ID NO:562. The disclosure also provides antibodies comprising a heavy chain variable domain sequence that is at least 80%, at least 85%, at least 90%, or at least 95% identical to SEQ ID NO:164 and a light chain variable domain sequence that is at least 80%, at least 85%, at least 90%, or at least 95% identical to SEQ ID NO:563. The disclosure also provides antibodies comprising a heavy chain variable domain sequence that is at least 80%, at least 85%, at least 90%, or at least 95% identical to SEQ ID NO:237 and a light chain variable domain sequence that is at least 80%, at least 85%, at least 90%, or at least 95% identical to SEQ ID NO:564. The disclosure also provides antibodies comprising a heavy chain variable domain sequence that is at least 80%, at least 85%, at least 90%, or at least 95% identical to SEQ ID NO:201 and a light chain variable domain sequence that is at least 80%, at least 85%, at least 90%, or at least 95% identical to SEQ ID NO:565. The disclosure also provides antibodies comprising a heavy chain variable domain sequence that is at least 80%, at least 85%, at least 90%, or at least 95% identical to SEQ ID NO:192 and a light chain variable domain sequence that is at least 80%, at least 85%, at least 90%, or at least 95% identical to SEQ ID NO:566. The disclosure also provides antibodies comprising a heavy chain variable domain sequence that is at least 80%, at least 85%, at least 90%, or at least 95% identical to SEQ ID NO:238 and a light chain variable domain sequence that is at least 80%, at least 85%, at least 90%, or at least 95% identical to SEQ ID NO:567. The disclosure also provides antibodies comprising a heavy chain variable domain sequence that is at least 80%, at least 85%, at least 90%, or at least 95% identical to SEQ ID NO:210 and a light chain variable domain sequence that is at least 80%, at least 85%, at least 90%, or at least 95% identical to SEQ ID NO:568. The disclosure also provides antibodies comprising a heavy chain variable domain sequence that is at least 80%, at least 85%, at least 90%, or at least 95% identical to SEQ ID NO:239 and a light chain variable domain sequence that is at least 80%, at least 85%, at least 90%, or at least 95% identical to SEQ ID NO:569. The disclosure also provides antibodies comprising a heavy chain variable domain sequence that is at least 80%, at least 85%, at least 90%, or at least 95% identical to SEQ ID NO:240 and a light chain variable domain sequence that is at least 80%, at least 85%, at least 90%, or at least 95% identical to SEQ ID NO:517. The disclosure also provides antibodies comprising a heavy chain variable domain sequence that is at least 80%, at least 85%, at least 90%, or at least 95% identical to SEQ ID NO:241 and a light chain variable domain sequence that is at least 80%, at least 85%, at least 90%, or at least 95% identical to SEQ ID NO:570. The disclosure also provides antibodies comprising a heavy chain variable domain sequence that is at least 80%, at least 85%, at least 90%, or at least 95% identical to SEQ ID NO:242 and a light chain variable domain sequence that is at least 80%, at least 85%, at least 90%, or at least 95% identical to SEQ ID NO:571. The disclosure also provides antibodies comprising a heavy chain variable domain sequence that is at least 80%, at least 85%, at least 90%, or at least 95% identical to SEQ ID NO:243 and a light chain variable domain sequence that is at least 80%, at least 85%, at least 90%, or at least 95% identical to SEQ ID NO:572. The disclosure also provides antibodies comprising a heavy chain variable domain sequence that is at least 80%, at least 85%, at least 90%, or at least 95% identical to SEQ ID NO:182 and a light chain variable domain sequence that is at least 80%, at least 85%, at least 90%, or at least 95% identical to SEQ ID NO:573. The disclosure also provides antibodies comprising a heavy chain variable domain sequence that is at least 80%, at least 85%, at least 90%, or at least 95% identical to SEQ ID NO:244 and a light chain variable domain sequence that is at least 80%, at least 85%, at least 90%, or at least 95% identical to SEQ ID NO:574. The disclosure also provides antibodies comprising a heavy chain variable domain sequence that is at least 80%, at least 85%, at least 90%, or at least 95% identical to SEQ ID NO:245 and a light chain variable domain sequence that is at least 80%, at least 85%, at least 90%, or at least 95% identical to SEQ ID NO:575. The disclosure also provides antibodies comprising a heavy chain variable domain sequence that is at least 80%, at least 85%, at least 90%, or at least 95% identical to SEQ ID NO:246 and a light chain variable domain sequence that is at least 80%, at least 85%, at least 90%, or at least 95% identical to SEQ ID NO:576. The disclosure also provides antibodies comprising a heavy chain variable domain sequence that is at least 80%, at least 85%, at least 90%, or at least 95% identical to SEQ ID NO:230 and a light chain variable domain sequence that is at least 80%, at least 85%, at least 90%, or at least 95% identical to SEQ ID NO:577. The disclosure also provides antibodies comprising a heavy chain variable domain sequence that is at least 80%, at least 85%, at least 90%, or at least 95% identical to SEQ ID NO:247 and a light chain variable domain sequence that is at least 80%, at least 85%, at least 90%, or at least 95% identical to SEQ ID NO:540. The disclosure also provides antibodies comprising a heavy chain variable domain sequence that is at least 80%, at least 85%, at least 90%, or at least 95% identical to SEQ ID NO:246 and a light chain variable domain sequence that is at least 80%, at least 85%, at least 90%, or at least 95% identical to SEQ ID NO:578. The disclosure also provides antibodies comprising a heavy chain variable domain sequence that is at least 80%, at least 85%, at least 90%, or at least 95% identical to SEQ ID NO:248 and a light chain variable domain sequence that is at least 80%, at least 85%, at least 90%, or at least 95% identical to SEQ ID NO:482. The disclosure also provides antibodies comprising a heavy chain variable domain sequence that is at least 80%, at least 85%, at least 90%, or at least 95% identical to SEQ ID NO:249 and a light chain variable domain sequence that is at least 80%, at least 85%, at least 90%, or at least 95% identical to SEQ ID NO:579. The disclosure also provides antibodies comprising a heavy chain variable domain sequence that is at least 80%, at least 85%, at least 90%, or at least 95% identical to SEQ ID NO:198 and a light chain variable domain sequence that is at least 80%, at least 85%, at least 90%, or at least 95% identical to SEQ ID NO:580. The disclosure also provides antibodies comprising a heavy chain variable domain sequence that is at least 80%, at least 85%, at least 90%, or at least 95% identical to SEQ ID NO:173 and a light chain variable domain sequence that is at least 80%, at least 85%, at least 90%, or at least 95% identical to SEQ ID NO:581. The disclosure also provides antibodies comprising a heavy chain variable domain sequence that is at least 80%, at least 85%, at least 90%, or at least 95% identical to SEQ ID NO:250 and a light chain variable domain sequence that is at least 80%, at least 85%, at least 90%, or at least 95% identical to SEQ ID NO:582. The disclosure also provides antibodies comprising a heavy chain variable domain sequence that is at least 80%, at least 85%, at least 90%, or at least 95% identical to SEQ ID NO:251 and a light chain variable domain sequence that is at least 80%, at least 85%, at least 90%, or at least 95% identical to SEQ ID NO:583. The disclosure also provides antibodies comprising a heavy chain variable domain sequence that is at least 80%, at least 85%, at least 90%, or at least 95% identical to SEQ ID NO:252 and a light chain variable domain sequence that is at least 80%, at least 85%, at least 90%, or at least 95% identical to SEQ ID NO:531. The disclosure also provides antibodies comprising a heavy chain variable domain sequence that is at least 80%, at least 85%, at least 90%, or at least 95% identical to SEQ ID NO:253 and a light chain variable domain sequence that is at least 80%, at least 85%, at least 90%, or at least 95% identical to SEQ ID NO:584. The disclosure also provides antibodies comprising a heavy chain variable domain sequence that is at least 80%, at least 85%, at least 90%, or at least 95% identical to SEQ ID NO:254 and a light chain variable domain sequence that is at least 80%, at least 85%, at least 90%, or at least 95% identical to SEQ ID NO:585. The disclosure also provides antibodies comprising a heavy chain variable domain sequence that is at least 80%, at least 85%, at least 90%, or at least 95% identical to SEQ ID NO:189 and a light chain variable domain sequence that is at least 80%, at least 85%, at least 90%, or at least 95% identical to SEQ ID NO:586. The disclosure also provides antibodies comprising a heavy chain variable domain sequence that is at least 80%, at least 85%, at least 90%, or at least 95% identical to SEQ ID NO:255 and a light chain variable domain sequence that is at least 80%, at least 85%, at least 90%, or at least 95% identical to SEQ ID NO:482. The disclosure also provides antibodies comprising a heavy chain variable domain sequence that is at least 80%, at least 85%, at least 90%, or at least 95% identical to SEQ ID NO:256 and a light chain variable domain sequence that is at least 80%, at least 85%, at least 90%, or at least 95% identical to SEQ ID NO:587. The disclosure also provides antibodies comprising a heavy chain variable domain sequence that is at least 80%, at least 85%, at least 90%, or at least 95% identical to SEQ ID NO:257 and a light chain variable domain sequence that is at least 80%, at least 85%, at least 90%, or at least 95% identical to SEQ ID NO:588. The disclosure also provides antibodies comprising a heavy chain variable domain sequence that is at least 80%, at least 85%, at least 90%, or at least 95% identical to SEQ ID NO:258 and a light chain variable domain sequence that is at least 80%, at least 85%, at least 90%, or at least 95% identical to SEQ ID NO:589. The disclosure also provides antibodies comprising a heavy chain variable domain sequence that is at least 80%, at least 85%, at least 90%, or at least 95% identical to SEQ ID NO:259 and a light chain variable domain sequence that is at least 80%, at least 85%, at least 90%, or at least 95% identical to SEQ ID NO:590. The disclosure also provides antibodies comprising a heavy chain variable domain sequence that is at least 80%, at least 85%, at least 90%, or at least 95% identical to SEQ ID NO:260 and a light chain variable domain sequence that is at least 80%, at least 85%, at least 90%, or at least 95% identical to SEQ ID NO:591. The disclosure also provides antibodies comprising a heavy chain variable domain sequence that is at least 80%, at least 85%, at least 90%, or at least 95% identical to SEQ ID NO:261 and a light chain variable domain sequence that is at least 80%, at least 85%, at least 90%, or at least 95% identical to SEQ ID NO:592. The disclosure also provides antibodies comprising a heavy chain variable domain sequence that is at least 80%, at least 85%, at least 90%, or at least 95% identical to SEQ ID NO:262 and a light chain variable domain sequence that is at least 80%, at least 85%, at least 90%, or at least 95% identical to SEQ ID NO:593. The disclosure also provides antibodies comprising a heavy chain variable domain sequence that is at least 80%, at least 85%, at least 90%, or at least 95% identical to SEQ ID NO:263 and a light chain variable domain sequence that is at least 80%, at least 85%, at least 90%, or at least 95% identical to SEQ ID NO:594. The disclosure also provides antibodies comprising a heavy chain variable domain sequence that is at least 80%, at least 85%, at least 90%, or at least 95% identical to SEQ ID NO:220 and a light chain variable domain sequence that is at least 80%, at least 85%, at least 90%, or at least 95% identical to SEQ ID NO:595. The disclosure also provides antibodies comprising a heavy chain variable domain sequence that is at least 80%, at least 85%, at least 90%, or at least 95% identical to SEQ ID NO:264 and a light chain variable domain sequence that is at least 80%, at least 85%, at least 90%, or at least 95% identical to SEQ ID NO:596. The disclosure also provides antibodies comprising a heavy chain variable domain sequence that is at least 80%, at least 85%, at least 90%, or at least 95% identical to SEQ ID NO:189 and a light chain variable domain sequence that is at least 80%, at least 85%, at least 90%, or at least 95% identical to SEQ ID NO:596. The disclosure also provides antibodies comprising a heavy chain variable domain sequence that is at least 80%, at least 85%, at least 90%, or at least 95% identical to SEQ ID NO:265 and a light chain variable domain sequence that is at least 80%, at least 85%, at least 90%, or at least 95% identical to SEQ ID NO:597. The disclosure also provides antibodies comprising a heavy chain variable domain sequence that is at least 80%, at least 85%, at least 90%, or at least 95% identical to SEQ ID NO:266 and a light chain variable domain sequence that is at least 80%, at least 85%, at least 90%, or at least 95% identical to SEQ ID NO:598. The disclosure also provides antibodies comprising a heavy chain variable domain sequence that is at least 80%, at least 85%, at least 90%, or at least 95% identical to SEQ ID NO:267 and a light chain variable domain sequence that is at least 80%, at least 85%, at least 90%, or at least 95% identical to SEQ ID NO:599. The disclosure also provides antibodies comprising a heavy chain variable domain sequence that is at least 80%, at least 85%, at least 90%, or at least 95% identical to SEQ ID NO:268 and a light chain variable domain sequence that is at least 80%, at least 85%, at least 90%, or at least 95% identical to SEQ ID NO:600. The disclosure also provides antibodies comprising a heavy chain variable domain sequence that is at least 80%, at least 85%, at least 90%, or at least 95% identical to SEQ ID NO:201 and a light chain variable domain sequence that is at least 80%, at least 85%, at least 90%, or at least 95% identical to SEQ ID NO:515. The disclosure also provides antibodies comprising a heavy chain variable domain sequence that is at least 80%, at least 85%, at least 90%, or at least 95% identical to SEQ ID NO:269 and a light chain variable domain sequence that is at least 80%, at least 85%, at least 90%, or at least 95% identical to SEQ ID NO:601. The disclosure also provides antibodies comprising a heavy chain variable domain sequence that is at least 80%, at least 85%, at least 90%, or at least 95% identical to SEQ ID NO:257 and a light chain variable domain sequence that is at least 80%, at least 85%, at least 90%, or at least 95% identical to SEQ ID NO:506. The disclosure also provides antibodies comprising a heavy chain variable domain sequence that is at least 80%, at least 85%, at least 90%, or at least 95% identical to SEQ ID NO:201 and a light chain variable domain sequence that is at least 80%, at least 85%, at least 90%, or at least 95% identical to SEQ ID NO:602. The disclosure also provides antibodies comprising a heavy chain variable domain sequence that is at least 80%, at least 85%, at least 90%, or at least 95% identical to SEQ ID NO:270 and a light chain variable domain sequence that is at least 80%, at least 85%, at least 90%, or at least 95% identical to SEQ ID NO:603. The disclosure also provides antibodies comprising a heavy chain variable domain sequence that is at least 80%, at least 85%, at least 90%, or at least 95% identical to SEQ ID NO:271 and a light chain variable domain sequence that is at least 80%, at least 85%, at least 90%, or at least 95% identical to SEQ ID NO:552. The disclosure also provides antibodies comprising a heavy chain variable domain sequence that is at least 80%, at least 85%, at least 90%, or at least 95% identical to SEQ ID NO:177 and a light chain variable domain sequence that is at least 80%, at least 85%, at least 90%, or at least 95% identical to SEQ ID NO:604. The disclosure also provides antibodies comprising a heavy chain variable domain sequence that is at least 80%, at least 85%, at least 90%, or at least 95% identical to SEQ ID NO:183 and a light chain variable domain sequence that is at least 80%, at least 85%, at least 90%, or at least 95% identical to SEQ ID NO:469. The disclosure also provides antibodies comprising a heavy chain variable domain sequence that is at least 80%, at least 85%, at least 90%, or at least 95% identical to SEQ ID NO:272 and a light chain variable domain sequence that is at least 80%, at least 85%, at least 90%, or at least 95% identical to SEQ ID NO:605. The disclosure also provides antibodies comprising a heavy chain variable domain sequence that is at least 80%, at least 85%, at least 90%, or at least 95% identical to SEQ ID NO:273 and a light chain variable domain sequence that is at least 80%, at least 85%, at least 90%, or at least 95% identical to SEQ ID NO:606. The disclosure also provides antibodies comprising a heavy chain variable domain sequence that is at least 80%, at least 85%, at least 90%, or at least 95% identical to SEQ ID NO:274 and a light chain variable domain sequence that is at least 80%, at least 85%, at least 90%, or at least 95% identical to SEQ ID NO:596. The disclosure also provides antibodies comprising a heavy chain variable domain sequence that is at least 80%, at least 85%, at least 90%, or at least 95% identical to SEQ ID NO:275 and a light chain variable domain sequence that is at least 80%, at least 85%, at least 90%, or at least 95% identical to SEQ ID NO:607. The disclosure also provides antibodies comprising a heavy chain variable domain sequence that is at least 80%, at least 85%, at least 90%, or at least 95% identical to SEQ ID NO:276 and a light chain variable domain sequence that is at least 80%, at least 85%, at least 90%, or at least 95% identical to SEQ ID NO:608. The disclosure also provides antibodies comprising a heavy chain variable domain sequence that is at least 80%, at least 85%, at least 90%, or at least 95% identical to SEQ ID NO:277 and a light chain variable domain sequence that is at least 80%, at least 85%, at least 90%, or at least 95% identical to SEQ ID NO:466. The disclosure also provides antibodies comprising a heavy chain variable domain sequence that is at least 80%, at least 85%, at least 90%, or at least 95% identical to SEQ ID NO:278 and a light chain variable domain sequence that is at least 80%, at least 85%, at least 90%, or at least 95% identical to SEQ ID NO:609. The disclosure also provides antibodies comprising a heavy chain variable domain sequence that is at least 80%, at least 85%, at least 90%, or at least 95% identical to SEQ ID NO:279 and a light chain variable domain sequence that is at least 80%, at least 85%, at least 90%, or at least 95% identical to SEQ ID NO:610. The disclosure also provides antibodies comprising a heavy chain variable domain sequence that is at least 80%, at least 85%, at least 90%, or at least 95% identical to SEQ ID NO:280 and a light chain variable domain sequence that is at least 80%, at least 85%, at least 90%, or at least 95% identical to SEQ ID NO:611. The disclosure also provides antibodies comprising a heavy chain variable domain sequence that is at least 80%, at least 85%, at least 90%, or at least 95% identical to SEQ ID NO:281 and a light chain variable domain sequence that is at least 80%, at least 85%, at least 90%, or at least 95% identical to SEQ ID NO:482. The disclosure also provides antibodies comprising a heavy chain variable domain sequence that is at least 80%, at least 85%, at least 90%, or at least 95% identical to SEQ ID NO:282 and a light chain variable domain sequence that is at least 80%, at least 85%, at least 90%, or at least 95% identical to SEQ ID NO:612. The disclosure also provides antibodies comprising a heavy chain variable domain sequence that is at least 80%, at least 85%, at least 90%, or at least 95% identical to SEQ ID NO:283 and a light chain variable domain sequence that is at least 80%, at least 85%, at least 90%, or at least 95% identical to SEQ ID NO:613. The disclosure also provides antibodies comprising a heavy chain variable domain sequence that is at least 80%, at least 85%, at least 90%, or at least 95% identical to SEQ ID NO:284 and a light chain variable domain sequence that is at least 80%, at least 85%, at least 90%, or at least 95% identical to SEQ ID NO:614. The disclosure also provides antibodies comprising a heavy chain variable domain sequence that is at least 80%, at least 85%, at least 90%, or at least 95% identical to SEQ ID NO:285 and a light chain variable domain sequence that is at least 80%, at least 85%, at least 90%, or at least 95% identical to SEQ ID NO:615. The disclosure also provides antibodies comprising a heavy chain variable domain sequence that is at least 80%, at least 85%, at least 90%, or at least 95% identical to SEQ ID NO:224 and a light chain variable domain sequence that is at least 80%, at least 85%, at least 90%, or at least 95% identical to SEQ ID NO:608. The disclosure also provides antibodies comprising a heavy chain variable domain sequence that is at least 80%, at least 85%, at least 90%, or at least 95% identical to SEQ ID NO:286 and a light chain variable domain sequence that is at least 80%, at least 85%, at least 90%, or at least 95% identical to SEQ ID NO:616. The disclosure also provides antibodies comprising a heavy chain variable domain sequence that is at least 80%, at least 85%, at least 90%, or at least 95% identical to SEQ ID NO:180 and a light chain variable domain sequence that is at least 80%, at least 85%, at least 90%, or at least 95% identical to SEQ ID NO:617. The disclosure also provides antibodies comprising a heavy chain variable domain sequence that is at least 80%, at least 85%, at least 90%, or at least 95% identical to SEQ ID NO:287 and a light chain variable domain sequence that is at least 80%, at least 85%, at least 90%, or at least 95% identical to SEQ ID NO:618. The disclosure also provides antibodies comprising a heavy chain variable domain sequence that is at least 80%, at least 85%, at least 90%, or at least 95% identical to SEQ ID NO:288 and a light chain variable domain sequence that is at least 80%, at least 85%, at least 90%, or at least 95% identical to SEQ ID NO:619. The disclosure also provides antibodies comprising a heavy chain variable domain sequence that is at least 80%, at least 85%, at least 90%, or at least 95% identical to SEQ ID NO:289 and a light chain variable domain sequence that is at least 80%, at least 85%, at least 90%, or at least 95% identical to SEQ ID NO:620. The disclosure also provides antibodies comprising a heavy chain variable domain sequence that is at least 80%, at least 85%, at least 90%, or at least 95% identical to SEQ ID NO:238 and a light chain variable domain sequence that is at least 80%, at least 85%, at least 90%, or at least 95% identical to SEQ ID NO:621. The disclosure also provides antibodies comprising a heavy chain variable domain sequence that is at least 80%, at least 85%, at least 90%, or at least 95% identical to SEQ ID NO:177 and a light chain variable domain sequence that is at least 80%, at least 85%, at least 90%, or at least 95% identical to SEQ ID NO:622. The disclosure also provides antibodies comprising a heavy chain variable domain sequence that is at least 80%, at least 85%, at least 90%, or at least 95% identical to SEQ ID NO:290 and a light chain variable domain sequence that is at least 80%, at least 85%, at least 90%, or at least 95% identical to SEQ ID NO:623. The disclosure also provides antibodies comprising a heavy chain variable domain sequence that is at least 80%, at least 85%, at least 90%, or at least 95% identical to SEQ ID NO:291 and a light chain variable domain sequence that is at least 80%, at least 85%, at least 90%, or at least 95% identical to SEQ ID NO:572. The disclosure also provides antibodies comprising a heavy chain variable domain sequence that is at least 80%, at least 85%, at least 90%, or at least 95% identical to SEQ ID NO:292 and a light chain variable domain sequence that is at least 80%, at least 85%, at least 90%, or at least 95% identical to SEQ ID NO:624. The disclosure also provides antibodies comprising a heavy chain variable domain sequence that is at least 80%, at least 85%, at least 90%, or at least 95% identical to SEQ ID NO:293 and a light chain variable domain sequence that is at least 80%, at least 85%, at least 90%, or at least 95% identical to SEQ ID NO:529. The disclosure also provides antibodies comprising a heavy chain variable domain sequence that is at least 80%, at least 85%, at least 90%, or at least 95% identical to SEQ ID NO:177 and a light chain variable domain sequence that is at least 80%, at least 85%, at least 90%, or at least 95% identical to SEQ ID NO:625. The disclosure also provides antibodies comprising a heavy chain variable domain sequence that is at least 80%, at least 85%, at least 90%, or at least 95% identical to SEQ ID NO:294 and a light chain variable domain sequence that is at least 80%, at least 85%, at least 90%, or at least 95% identical to SEQ ID NO:626. The disclosure also provides antibodies comprising a heavy chain variable domain sequence that is at least 80%, at least 85%, at least 90%, or at least 95% identical to SEQ ID NO:295 and a light chain variable domain sequence that is at least 80%, at least 85%, at least 90%, or at least 95% identical to SEQ ID NO:512. The disclosure also provides antibodies comprising a heavy chain variable domain sequence that is at least 80%, at least 85%, at least 90%, or at least 95% identical to SEQ ID NO:296 and a light chain variable domain sequence that is at least 80%, at least 85%, at least 90%, or at least 95% identical to SEQ ID NO:627. The disclosure also provides antibodies comprising a heavy chain variable domain sequence that is at least 80%, at least 85%, at least 90%, or at least 95% identical to SEQ ID NO:173 and a light chain variable domain sequence that is at least 80%, at least 85%, at least 90%, or at least 95% identical to SEQ ID NO:628. The disclosure also provides antibodies comprising a heavy chain variable domain sequence that is at least 80%, at least 85%, at least 90%, or at least 95% identical to SEQ ID NO:297 and a light chain variable domain sequence that is at least 80%, at least 85%, at least 90%, or at least 95% identical to SEQ ID NO:629. The disclosure also provides antibodies comprising a heavy chain variable domain sequence that is at least 80%, at least 85%, at least 90%, or at least 95% identical to SEQ ID NO:298 and a light chain variable domain sequence that is at least 80%, at least 85%, at least 90%, or at least 95% identical to SEQ ID NO:630. The disclosure also provides antibodies comprising a heavy chain variable domain sequence that is at least 80%, at least 85%, at least 90%, or at least 95% identical to SEQ ID NO:299 and a light chain variable domain sequence that is at least 80%, at least 85%, at least 90%, or at least 95% identical to SEQ ID NO:466. The disclosure also provides antibodies comprising a heavy chain variable domain sequence that is at least 80%, at least 85%, at least 90%, or at least 95% identical to SEQ ID NO:300 and a light chain variable domain sequence that is at least 80%, at least 85%, at least 90%, or at least 95% identical to SEQ ID NO:631. The disclosure also provides antibodies comprising a heavy chain variable domain sequence that is at least 80%, at least 85%, at least 90%, or at least 95% identical to SEQ ID NO:301 and a light chain variable domain sequence that is at least 80%, at least 85%, at least 90%, or at least 95% identical to SEQ ID NO:580. The disclosure also provides antibodies comprising a heavy chain variable domain sequence that is at least 80%, at least 85%, at least 90%, or at least 95% identical to SEQ ID NO:176 and a light chain variable domain sequence that is at least 80%, at least 85%, at least 90%, or at least 95% identical to SEQ ID NO:632. The disclosure also provides antibodies comprising a heavy chain variable domain sequence that is at least 80%, at least 85%, at least 90%, or at least 95% identical to SEQ ID NO:302 and a light chain variable domain sequence that is at least 80%, at least 85%, at least 90%, or at least 95% identical to SEQ ID NO:633. The disclosure also provides antibodies comprising a heavy chain variable domain sequence that is at least 80%, at least 85%, at least 90%, or at least 95% identical to SEQ ID NO:267 and a light chain variable domain sequence that is at least 80%, at least 85%, at least 90%, or at least 95% identical to SEQ ID NO:531. The disclosure also provides antibodies comprising a heavy chain variable domain sequence that is at least 80%, at least 85%, at least 90%, or at least 95% identical to SEQ ID NO:303 and a light chain variable domain sequence that is at least 80%, at least 85%, at least 90%, or at least 95% identical to SEQ ID NO:634. The disclosure also provides antibodies comprising a heavy chain variable domain sequence that is at least 80%, at least 85%, at least 90%, or at least 95% identical to SEQ ID NO:304 and a light chain variable domain sequence that is at least 80%, at least 85%, at least 90%, or at least 95% identical to SEQ ID NO:612. The disclosure also provides antibodies comprising a heavy chain variable domain sequence that is at least 80%, at least 85%, at least 90%, or at least 95% identical to SEQ ID NO:305 and a light chain variable domain sequence that is at least 80%, at least 85%, at least 90%, or at least 95% identical to SEQ ID NO:635. The disclosure also provides antibodies comprising a heavy chain variable domain sequence that is at least 80%, at least 85%, at least 90%, or at least 95% identical to SEQ ID NO:306 and a light chain variable domain sequence that is at least 80%, at least 85%, at least 90%, or at least 95% identical to SEQ ID NO:636. The disclosure also provides antibodies comprising a heavy chain variable domain sequence that is at least 80%, at least 85%, at least 90%, or at least 95% identical to SEQ ID NO:307 and a light chain variable domain sequence that is at least 80%, at least 85%, at least 90%, or at least 95% identical to SEQ ID NO:596. The disclosure also provides antibodies comprising a heavy chain variable domain sequence that is at least 80%, at least 85%, at least 90%, or at least 95% identical to SEQ ID NO:308 and a light chain variable domain sequence that is at least 80%, at least 85%, at least 90%, or at least 95% identical to SEQ ID NO:637. The disclosure also provides antibodies comprising a heavy chain variable domain sequence that is at least 80%, at least 85%, at least 90%, or at least 95% identical to SEQ ID NO:309 and a light chain variable domain sequence that is at least 80%, at least 85%, at least 90%, or at least 95% identical to SEQ ID NO:638. The disclosure also provides antibodies comprising a heavy chain variable domain sequence that is at least 80%, at least 85%, at least 90%, or at least 95% identical to SEQ ID NO:310 and a light chain variable domain sequence that is at least 80%, at least 85%, at least 90%, or at least 95% identical to SEQ ID NO:639. The disclosure also provides antibodies comprising a heavy chain variable domain sequence that is at least 80%, at least 85%, at least 90%, or at least 95% identical to SEQ ID NO:311 and a light chain variable domain sequence that is at least 80%, at least 85%, at least 90%, or at least 95% identical to SEQ ID NO:552. The disclosure also provides antibodies comprising a heavy chain variable domain sequence that is at least 80%, at least 85%, at least 90%, or at least 95% identical to SEQ ID NO:312 and a light chain variable domain sequence that is at least 80%, at least 85%, at least 90%, or at least 95% identical to SEQ ID NO:640. The disclosure also provides antibodies comprising a heavy chain variable domain sequence that is at least 80%, at least 85%, at least 90%, or at least 95% identical to SEQ ID NO:313 and a light chain variable domain sequence that is at least 80%, at least 85%, at least 90%, or at least 95% identical to SEQ ID NO:641. The disclosure also provides antibodies comprising a heavy chain variable domain sequence that is at least 80%, at least 85%, at least 90%, or at least 95% identical to SEQ ID NO:314 and a light chain variable domain sequence that is at least 80%, at least 85%, at least 90%, or at least 95% identical to SEQ ID NO:642. The disclosure also provides antibodies comprising a heavy chain variable domain sequence that is at least 80%, at least 85%, at least 90%, or at least 95% identical to SEQ ID NO:315 and a light chain variable domain sequence that is at least 80%, at least 85%, at least 90%, or at least 95% identical to SEQ ID NO:643. The disclosure also provides antibodies comprising a heavy chain variable domain sequence that is at least 80%, at least 85%, at least 90%, or at least 95% identical to SEQ ID NO:316 and a light chain variable domain sequence that is at least 80%, at least 85%, at least 90%, or at least 95% identical to SEQ ID NO:644. The disclosure also provides antibodies comprising a heavy chain variable domain sequence that is at least 80%, at least 85%, at least 90%, or at least 95% identical to SEQ ID NO:311 and a light chain variable domain sequence that is at least 80%, at least 85%, at least 90%, or at least 95% identical to SEQ ID NO:645. The disclosure also provides antibodies comprising a heavy chain variable domain sequence that is at least 80%, at least 85%, at least 90%, or at least 95% identical to SEQ ID NO:317 and a light chain variable domain sequence that is at least 80%, at least 85%, at least 90%, or at least 95% identical to SEQ ID NO:645. The disclosure also provides antibodies comprising a heavy chain variable domain sequence that is at least 80%, at least 85%, at least 90%, or at least 95% identical to SEQ ID NO:318 and a light chain variable domain sequence that is at least 80%, at least 85%, at least 90%, or at least 95% identical to SEQ ID NO:646. The disclosure also provides antibodies comprising a heavy chain variable domain sequence that is at least 80%, at least 85%, at least 90%, or at least 95% identical to SEQ ID NO:319 and a light chain variable domain sequence that is at least 80%, at least 85%, at least 90%, or at least 95% identical to SEQ ID NO:647. The disclosure also provides antibodies comprising a heavy chain variable domain sequence that is at least 80%, at least 85%, at least 90%, or at least 95% identical to SEQ ID NO:320 and a light chain variable domain sequence that is at least 80%, at least 85%, at least 90%, or at least 95% identical to SEQ ID NO:552. The disclosure also provides antibodies comprising a heavy chain variable domain sequence that is at least 80%, at least 85%, at least 90%, or at least 95% identical to SEQ ID NO:321 and a light chain variable domain sequence that is at least 80%, at least 85%, at least 90%, or at least 95% identical to SEQ ID NO:648. The disclosure also provides antibodies comprising a heavy chain variable domain sequence that is at least 80%, at least 85%, at least 90%, or at least 95% identical to SEQ ID NO:322 and a light chain variable domain sequence that is at least 80%, at least 85%, at least 90%, or at least 95% identical to SEQ ID NO:649. The disclosure also provides antibodies comprising a heavy chain variable domain sequence that is at least 80%, at least 85%, at least 90%, or at least 95% identical to SEQ ID NO:323 and a light chain variable domain sequence that is at least 80%, at least 85%, at least 90%, or at least 95% identical to SEQ ID NO:650. The disclosure also provides antibodies comprising a heavy chain variable domain sequence that is at least 80%, at least 85%, at least 90%, or at least 95% identical to SEQ ID NO:315 and a light chain variable domain sequence that is at least 80%, at least 85%, at least 90%, or at least 95% identical to SEQ ID NO:651. The disclosure also provides antibodies comprising a heavy chain variable domain sequence that is at least 80%, at least 85%, at least 90%, or at least 95% identical to SEQ ID NO:324 and a light chain variable domain sequence that is at least 80%, at least 85%, at least 90%, or at least 95% identical to SEQ ID NO:652. The disclosure also provides antibodies comprising a heavy chain variable domain sequence that is at least 80%, at least 85%, at least 90%, or at least 95% identical to SEQ ID NO:325 and a light chain variable domain sequence that is at least 80%, at least 85%, at least 90%, or at least 95% identical to SEQ ID NO:653. The disclosure also provides antibodies comprising a heavy chain variable domain sequence that is at least 80%, at least 85%, at least 90%, or at least 95% identical to SEQ ID NO:326 and a light chain variable domain sequence that is at least 80%, at least 85%, at least 90%, or at least 95% identical to SEQ ID NO:482. The disclosure also provides antibodies comprising a heavy chain variable domain sequence that is at least 80%, at least 85%, at least 90%, or at least 95% identical to SEQ ID NO:313 and a light chain variable domain sequence that is at least 80%, at least 85%, at least 90%, or at least 95% identical to SEQ ID NO:645. The disclosure also provides antibodies comprising a heavy chain variable domain sequence that is at least 80%, at least 85%, at least 90%, or at least 95% identical to SEQ ID NO:327 and a light chain variable domain sequence that is at least 80%, at least 85%, at least 90%, or at least 95% identical to SEQ ID NO:654. The disclosure also provides antibodies comprising a heavy chain variable domain sequence that is at least 80%, at least 85%, at least 90%, or at least 95% identical to SEQ ID NO:328 and a light chain variable domain sequence that is at least 80%, at least 85%, at least 90%, or at least 95% identical to SEQ ID NO:655. The disclosure also provides antibodies comprising a heavy chain variable domain sequence that is at least 80%, at least 85%, at least 90%, or at least 95% identical to SEQ ID NO:329 and a light chain variable domain sequence that is at least 80%, at least 85%, at least 90%, or at least 95% identical to SEQ ID NO:656. The disclosure also provides antibodies comprising a heavy chain variable domain sequence that is at least 80%, at least 85%, at least 90%, or at least 95% identical to SEQ ID NO:330 and a light chain variable domain sequence that is at least 80%, at least 85%, at least 90%, or at least 95% identical to SEQ ID NO:572. The disclosure also provides antibodies comprising a heavy chain variable domain sequence that is at least 80%, at least 85%, at least 90%, or at least 95% identical to SEQ ID NO:331 and a light chain variable domain sequence that is at least 80%, at least 85%, at least 90%, or at least 95% identical to SEQ ID NO:657. The disclosure also provides antibodies comprising a heavy chain variable domain sequence that is at least 80%, at least 85%, at least 90%, or at least 95% identical to SEQ ID NO:332 and a light chain variable domain sequence that is at least 80%, at least 85%, at least 90%, or at least 95% identical to SEQ ID NO:652. The disclosure also provides antibodies comprising a heavy chain variable domain sequence that is at least 80%, at least 85%, at least 90%, or at least 95% identical to SEQ ID NO:333 and a light chain variable domain sequence that is at least 80%, at least 85%, at least 90%, or at least 95% identical to SEQ ID NO:658. The disclosure also provides antibodies comprising a heavy chain variable domain sequence that is at least 80%, at least 85%, at least 90%, or at least 95% identical to SEQ ID NO:334 and a light chain variable domain sequence that is at least 80%, at least 85%, at least 90%, or at least 95% identical to SEQ ID NO:659. The disclosure also provides antibodies comprising a heavy chain variable domain sequence that is at least 80%, at least 85%, at least 90%, or at least 95% identical to SEQ ID NO:335 and a light chain variable domain sequence that is at least 80%, at least 85%, at least 90%, or at least 95% identical to SEQ ID NO:660. The disclosure also provides antibodies comprising a heavy chain variable domain sequence that is at least 80%, at least 85%, at least 90%, or at least 95% identical to SEQ ID NO:336 and a light chain variable domain sequence that is at least 80%, at least 85%, at least 90%, or at least 95% identical to SEQ ID NO:661. The disclosure also provides antibodies comprising a heavy chain variable domain sequence that is at least 80%, at least 85%, at least 90%, or at least 95% identical to SEQ ID NO:337 and a light chain variable domain sequence that is at least 80%, at least 85%, at least 90%, or at least 95% identical to SEQ ID NO:643. The disclosure also provides antibodies comprising a heavy chain variable domain sequence that is at least 80%, at least 85%, at least 90%, or at least 95% identical to SEQ ID NO:338 and a light chain variable domain sequence that is at least 80%, at least 85%, at least 90%, or at least 95% identical to SEQ ID NO:552. The disclosure also provides antibodies comprising a heavy chain variable domain sequence that is at least 80%, at least 85%, at least 90%, or at least 95% identical to SEQ ID NO:339 and a light chain variable domain sequence that is at least 80%, at least 85%, at least 90%, or at least 95% identical to SEQ ID NO:662. The disclosure also provides antibodies comprising a heavy chain variable domain sequence that is at least 80%, at least 85%, at least 90%, or at least 95% identical to SEQ ID NO:340 and a light chain variable domain sequence that is at least 80%, at least 85%, at least 90%, or at least 95% identical to SEQ ID NO:663. The disclosure also provides antibodies comprising a heavy chain variable domain sequence that is at least 80%, at least 85%, at least 90%, or at least 95% identical to SEQ ID NO:341 and a light chain variable domain sequence that is at least 80%, at least 85%, at least 90%, or at least 95% identical to SEQ ID NO:645. The disclosure also provides antibodies comprising a heavy chain variable domain sequence that is at least 80%, at least 85%, at least 90%, or at least 95% identical to SEQ ID NO:342 and a light chain variable domain sequence that is at least 80%, at least 85%, at least 90%, or at least 95% identical to SEQ ID NO:664. The disclosure also provides antibodies comprising a heavy chain variable domain sequence that is at least 80%, at least 85%, at least 90%, or at least 95% identical to SEQ ID NO:343 and a light chain variable domain sequence that is at least 80%, at least 85%, at least 90%, or at least 95% identical to SEQ ID NO:572. The disclosure also provides antibodies comprising a heavy chain variable domain sequence that is at least 80%, at least 85%, at least 90%, or at least 95% identical to SEQ ID NO:344 and a light chain variable domain sequence that is at least 80%, at least 85%, at least 90%, or at least 95% identical to SEQ ID NO:665. The disclosure also provides antibodies comprising a heavy chain variable domain sequence that is at least 80%, at least 85%, at least 90%, or at least 95% identical to SEQ ID NO:345 and a light chain variable domain sequence that is at least 80%, at least 85%, at least 90%, or at least 95% identical to SEQ ID NO:483. The disclosure also provides antibodies comprising a heavy chain variable domain sequence that is at least 80%, at least 85%, at least 90%, or at least 95% identical to SEQ ID NO:346 and a light chain variable domain sequence that is at least 80%, at least 85%, at least 90%, or at least 95% identical to SEQ ID NO:666. The disclosure also provides antibodies comprising a heavy chain variable domain sequence that is at least 80%, at least 85%, at least 90%, or at least 95% identical to SEQ ID NO:347 and a light chain variable domain sequence that is at least 80%, at least 85%, at least 90%, or at least 95% identical to SEQ ID NO:667. The disclosure also provides antibodies comprising a heavy chain variable domain sequence that is at least 80%, at least 85%, at least 90%, or at least 95% identical to SEQ ID NO:348 and a light chain variable domain sequence that is at least 80%, at least 85%, at least 90%, or at least 95% identical to SEQ ID NO:572. The disclosure also provides antibodies comprising a heavy chain variable domain sequence that is at least 80%, at least 85%, at least 90%, or at least 95% identical to SEQ ID NO:349 and a light chain variable domain sequence that is at least 80%, at least 85%, at least 90%, or at least 95% identical to SEQ ID NO:668. The disclosure also provides antibodies comprising a heavy chain variable domain sequence that is at least 80%, at least 85%, at least 90%, or at least 95% identical to SEQ ID NO:350 and a light chain variable domain sequence that is at least 80%, at least 85%, at least 90%, or at least 95% identical to SEQ ID NO:643. The disclosure also provides antibodies comprising a heavy chain variable domain sequence that is at least 80%, at least 85%, at least 90%, or at least 95% identical to SEQ ID NO:351 and a light chain variable domain sequence that is at least 80%, at least 85%, at least 90%, or at least 95% identical to SEQ ID NO:669. The disclosure also provides antibodies comprising a heavy chain variable domain sequence that is at least 80%, at least 85%, at least 90%, or at least 95% identical to SEQ ID NO:352 and a light chain variable domain sequence that is at least 80%, at least 85%, at least 90%, or at least 95% identical to SEQ ID NO:669. The disclosure also provides antibodies comprising a heavy chain variable domain sequence that is at least 80%, at least 85%, at least 90%, or at least 95% identical to SEQ ID NO:353 and a light chain variable domain sequence that is at least 80%, at least 85%, at least 90%, or at least 95% identical to SEQ ID NO:670. The disclosure also provides antibodies comprising a heavy chain variable domain sequence that is at least 80%, at least 85%, at least 90%, or at least 95% identical to SEQ ID NO:354 and a light chain variable domain sequence that is at least 80%, at least 85%, at least 90%, or at least 95% identical to SEQ ID NO:671. The disclosure also provides antibodies comprising a heavy chain variable domain sequence that is at least 80%, at least 85%, at least 90%, or at least 95% identical to SEQ ID NO:355 and a light chain variable domain sequence that is at least 80%, at least 85%, at least 90%, or at least 95% identical to SEQ ID NO:482. The disclosure also provides antibodies comprising a heavy chain variable domain sequence that is at least 80%, at least 85%, at least 90%, or at least 95% identical to SEQ ID NO:356 and a light chain variable domain sequence that is at least 80%, at least 85%, at least 90%, or at least 95% identical to SEQ ID NO:672. The disclosure also provides antibodies comprising a heavy chain variable domain sequence that is at least 80%, at least 85%, at least 90%, or at least 95% identical to SEQ ID NO:357 and a light chain variable domain sequence that is at least 80%, at least 85%, at least 90%, or at least 95% identical to SEQ ID NO:673. The disclosure also provides antibodies comprising a heavy chain variable domain sequence that is at least 80%, at least 85%, at least 90%, or at least 95% identical to SEQ ID NO:358 and a light chain variable domain sequence that is at least 80%, at least 85%, at least 90%, or at least 95% identical to SEQ ID NO:658. The disclosure also provides antibodies comprising a heavy chain variable domain sequence that is at least 80%, at least 85%, at least 90%, or at least 95% identical to SEQ ID NO:359 and a light chain variable domain sequence that is at least 80%, at least 85%, at least 90%, or at least 95% identical to SEQ ID NO:572. The disclosure also provides antibodies comprising a heavy chain variable domain sequence that is at least 80%, at least 85%, at least 90%, or at least 95% identical to SEQ ID NO:360 and a light chain variable domain sequence that is at least 80%, at least 85%, at least 90%, or at least 95% identical to SEQ ID NO:674. The disclosure also provides antibodies comprising a heavy chain variable domain sequence that is at least 80%, at least 85%, at least 90%, or at least 95% identical to SEQ ID NO:361 and a light chain variable domain sequence that is at least 80%, at least 85%, at least 90%, or at least 95% identical to SEQ ID NO:381. The disclosure also provides antibodies comprising a heavy chain variable domain sequence that is at least 80%, at least 85%, at least 90%, or at least 95% identical to SEQ ID NO:319 and a light chain variable domain sequence that is at least 80%, at least 85%, at least 90%, or at least 95% identical to SEQ ID NO:675. The disclosure also provides antibodies comprising a heavy chain variable domain sequence that is at least 80%, at least 85%, at least 90%, or at least 95% identical to SEQ ID NO:362 and a light chain variable domain sequence that is at least 80%, at least 85%, at least 90%, or at least 95% identical to SEQ ID NO:676. The disclosure also provides antibodies comprising a heavy chain variable domain sequence that is at least 80%, at least 85%, at least 90%, or at least 95% identical to SEQ ID NO:363 and a light chain variable domain sequence that is at least 80%, at least 85%, at least 90%, or at least 95% identical to SEQ ID NO:482. The disclosure also provides antibodies comprising a heavy chain variable domain sequence that is at least 80%, at least 85%, at least 90%, or at least 95% identical to SEQ ID NO:364 and a light chain variable domain sequence that is at least 80%, at least 85%, at least 90%, or at least 95% identical to SEQ ID NO:645. The disclosure also provides antibodies comprising a heavy chain variable domain sequence that is at least 80%, at least 85%, at least 90%, or at least 95% identical to SEQ ID NO:365 and a light chain variable domain sequence that is at least 80%, at least 85%, at least 90%, or at least 95% identical to SEQ ID NO:677. The disclosure also provides antibodies comprising a heavy chain variable domain sequence that is at least 80%, at least 85%, at least 90%, or at least 95% identical to SEQ ID NO:366 and a light chain variable domain sequence that is at least 80%, at least 85%, at least 90%, or at least 95% identical to SEQ ID NO:678. The disclosure also provides antibodies comprising a heavy chain variable domain sequence that is at least 80%, at least 85%, at least 90%, or at least 95% identical to SEQ ID NO:367 and a light chain variable domain sequence that is at least 80%, at least 85%, at least 90%, or at least 95% identical to SEQ ID NO:679. The disclosure also provides antibodies comprising a heavy chain variable domain sequence that is at least 80%, at least 85%, at least 90%, or at least 95% identical to SEQ ID NO:368 and a light chain variable domain sequence that is at least 80%, at least 85%, at least 90%, or at least 95% identical to SEQ ID NO:680. The disclosure also provides antibodies comprising a heavy chain variable domain sequence that is at least 80%, at least 85%, at least 90%, or at least 95% identical to SEQ ID NO:369 and a light chain variable domain sequence that is at least 80%, at least 85%, at least 90%, or at least 95% identical to SEQ ID NO:681. The disclosure also provides antibodies comprising a heavy chain variable domain sequence that is at least 80%, at least 85%, at least 90%, or at least 95% identical to SEQ ID NO:370 and a light chain variable domain sequence that is at least 80%, at least 85%, at least 90%, or at least 95% identical to SEQ ID NO:645. The disclosure also provides antibodies comprising a heavy chain variable domain sequence that is at least 80%, at least 85%, at least 90%, or at least 95% identical to SEQ ID NO:371 and a light chain variable domain sequence that is at least 80%, at least 85%, at least 90%, or at least 95% identical to SEQ ID NO:682. The disclosure also provides antibodies comprising a heavy chain variable domain sequence that is at least 80%, at least 85%, at least 90%, or at least 95% identical to SEQ ID NO:372 and a light chain variable domain sequence that is at least 80%, at least 85%, at least 90%, or at least 95% identical to SEQ ID NO:381. The disclosure also provides antibodies comprising a heavy chain variable domain sequence that is at least 80%, at least 85%, at least 90%, or at least 95% identical to SEQ ID NO:373 and a light chain variable domain sequence that is at least 80%, at least 85%, at least 90%, or at least 95% identical to SEQ ID NO:683. The disclosure also provides antibodies comprising a heavy chain variable domain sequence that is at least 80%, at least 85%, at least 90%, or at least 95% identical to SEQ ID NO:374 and a light chain variable domain sequence that is at least 80%, at least 85%, at least 90%, or at least 95% identical to SEQ ID NO:684. The disclosure also provides antibodies comprising a heavy chain variable domain sequence that is at least 80%, at least 85%, at least 90%, or at least 95% identical to SEQ ID NO:375 and a light chain variable domain sequence that is at least 80%, at least 85%, at least 90%, or at least 95% identical to SEQ ID NO:685. The disclosure also provides antibodies comprising a heavy chain variable domain sequence that is at least 80%, at least 85%, at least 90%, or at least 95% identical to SEQ ID NO:376 and a light chain variable domain sequence that is at least 80%, at least 85%, at least 90%, or at least 95% identical to SEQ ID NO:482. The disclosure also provides antibodies comprising a heavy chain variable domain sequence that is at least 80%, at least 85%, at least 90%, or at least 95% identical to SEQ ID NO:377 and a light chain variable domain sequence that is at least 80%, at least 85%, at least 90%, or at least 95% identical to SEQ ID NO:686. The disclosure also provides antibodies comprising a heavy chain variable domain sequence that is at least 80%, at least 85%, at least 90%, or at least 95% identical to SEQ ID NO:378 and a light chain variable domain sequence that is at least 80%, at least 85%, at least 90%, or at least 95% identical to SEQ ID NO:572. The disclosure also provides antibodies comprising a heavy chain variable domain sequence that is at least 80%, at least 85%, at least 90%, or at least 95% identical to SEQ ID NO:379 and a light chain variable domain sequence that is at least 80%, at least 85%, at least 90%, or at least 95% identical to SEQ ID NO:667. The disclosure also provides antibodies comprising a heavy chain variable domain sequence that is at least 80%, at least 85%, at least 90%, or at least 95% identical to SEQ ID NO:1366 and a light chain variable domain sequence that is at least 80%, at least 85%, at least 90%, or at least 95% identical to SEQ ID NO:1367. The disclosure also provides antibodies comprising a heavy chain variable domain sequence that is at least 80%, at least 85%, at least 90%, or at least 95% identical to SEQ ID NO:1366 and a light chain variable domain sequence that is at least 80%, at least 85%, at least 90%, or at least 95% identical to SEQ ID NO:1368. The disclosure also provides antibodies comprising a heavy chain variable domain sequence that is at least 80%, at least 85%, at least 90%, or at least 95% identical to SEQ ID NO:1369 and a light chain variable domain sequence that is at least 80%, at least 85%, at least 90%, or at least 95% identical to SEQ ID NO:1370. The disclosure also provides antibodies comprising a heavy chain variable domain sequence that is at least 80%, at least 85%, at least 90%, or at least 95% identical to SEQ ID NO:1369 and a light chain variable domain sequence that is at least 80%, at least 85%, at least 90%, or at least 95% identical to SEQ ID NO:1371. The disclosure also provides antibodies comprising a heavy chain variable domain sequence that is at least 80%, at least 85%, at least 90%, or at least 95% identical to SEQ ID NO:1372 and a light chain variable domain sequence that is at least 80%, at least 85%, at least 90%, or at least 95% identical to SEQ ID NO:1370. The disclosure also provides antibodies comprising a heavy chain variable domain sequence that is at least 80%, at least 85%, at least 90%, or at least 95% identical to SEQ ID NO:1372 and a light chain variable domain sequence that is at least 80%, at least 85%, at least 90%, or at least 95% identical to SEQ ID NO:1371. The disclosure also provides antibodies comprising a heavy chain variable domain sequence that is at least 80%, at least 85%, at least 90%, or at least 95% identical to SEQ ID NO:1373 and a light chain variable domain sequence that is at least 80%, at least 85%, at least 90%, or at least 95% identical to SEQ ID NO:1374. The disclosure also provides antibodies comprising a heavy chain variable domain sequence that is at least 80%, at least 85%, at least 90%, or at least 95% identical to SEQ ID NO:1373 and a light chain variable domain sequence that is at least 80%, at least 85%, at least 90%, or at least 95% identical to SEQ ID NO:1375. The disclosure also provides antibodies comprising a heavy chain variable domain sequence that is at least 80%, at least 85%, at least 90%, or at least 95% identical to SEQ ID NO:1376 and a light chain variable domain sequence that is at least 80%, at least 85%, at least 90%, or at least 95% identical to SEQ ID NO:1374. The disclosure also provides antibodies comprising a heavy chain variable domain sequence that is at least 80%, at least 85%, at least 90%, or at least 95% identical to SEQ ID NO:1376 and a light chain variable domain sequence that is at least 80%, at least 85%, at least 90%, or at least 95% identical to SEQ ID NO:1375. The disclosure also provides antibodies comprising a heavy chain variable domain sequence that is at least 80%, at least 85%, at least 90%, or at least 95% identical to SEQ ID NO:1377 and a light chain variable domain sequence that is at least 80%, at least 85%, at least 90%, or at least 95% identical to SEQ ID NO:1378. The disclosure also provides antibodies comprising a heavy chain variable domain sequence that is at least 80%, at least 85%, at least 90%, or at least 95% identical to SEQ ID NO:1377 and a light chain variable domain sequence that is at least 80%, at least 85%, at least 90%, or at least 95% identical to SEQ ID NO:1379. The disclosure also provides antibodies comprising a heavy chain variable domain sequence that is at least 80%, at least 85%, at least 90%, or at least 95% identical to SEQ ID NO:1380 and a light chain variable domain sequence that is at least 80%, at least 85%, at least 90%, or at least 95% identical to SEQ ID NO:1378. The disclosure also provides antibodies comprising a heavy chain variable domain sequence that is at least 80%, at least 85%, at least 90%, or at least 95% identical to SEQ ID NO:1380 and a light chain variable domain sequence that is at least 80%, at least 85%, at least 90%, or at least 95% identical to SEQ ID NO:1379. The disclosure also provides antibodies comprising a heavy chain variable domain sequence that is at least 80%, at least 85%, at least 90%, or at least 95% identical to SEQ ID NO:1381 and a light chain variable domain sequence that is at least 80%, at least 85%, at least 90%, or at least 95% identical to SEQ ID NO:1382. The disclosure also provides antibodies comprising a heavy chain variable domain sequence that is at least 80%, at least 85%, at least 90%, or at least 95% identical to SEQ ID NO:1381 and a light chain variable domain sequence that is at least 80%, at least 85%, at least 90%, or at least 95% identical to SEQ ID NO:1383. The disclosure also provides antibodies comprising a heavy chain variable domain sequence that is at least 80%, at least 85%, at least 90%, or at least 95% identical to SEQ ID NO:1384 and a light chain variable domain sequence that is at least 80%, at least 85%, at least 90%, or at least 95% identical to SEQ ID NO:1382. The disclosure also provides antibodies comprising a heavy chain variable domain sequence that is at least 80%, at least 85%, at least 90%, or at least 95% identical to SEQ ID NO:1384 and a light chain variable domain sequence that is at least 80%, at least 85%, at least 90%, or at least 95% identical to SEQ ID NO:1383. The disclosure also provides antibodies comprising a heavy chain variable domain sequence that is at least 80%, at least 85%, at least 90%, or at least 95% identical to SEQ ID NO:1385 and a light chain variable domain sequence that is at least 80%, at least 85%, at least 90%, or at least 95% identical to SEQ ID NO:1386. The disclosure also provides antibodies comprising a heavy chain variable domain sequence that is at least 80%, at least 85%, at least 90%, or at least 95% identical to SEQ ID NO:1385 and a light chain variable domain sequence that is at least 80%, at least 85%, at least 90%, or at least 95% identical to SEQ ID NO:1387. The disclosure also provides antibodies comprising a heavy chain variable domain sequence that is at least 80%, at least 85%, at least 90%, or at least 95% identical to SEQ ID NO:1388 and a light chain variable domain sequence that is at least 80%, at least 85%, at least 90%, or at least 95% identical to SEQ ID NO:1386. The disclosure also provides antibodies comprising a heavy chain variable domain sequence that is at least 80%, at least 85%, at least 90%, or at least 95% identical to SEQ ID NO:1388 and a light chain variable domain sequence that is at least 80%, at least 85%, at least 90%, or at least 95% identical to SEQ ID NO:1387. The disclosure also provides antibodies comprising a heavy chain variable domain sequence that is at least 80%, at least 85%, at least 90%, or at least 95% identical to SEQ ID NO:1389 and a light chain variable domain sequence that is at least 80%, at least 85%, at least 90%, or at least 95% identical to SEQ ID NO:1390. The disclosure also provides antibodies comprising a heavy chain variable domain sequence that is at least 80%, at least 85%, at least 90%, or at least 95% identical to SEQ ID NO:1391 and a light chain variable domain sequence that is at least 80%, at least 85%, at least 90%, or at least 95% identical to SEQ ID NO:1392. The disclosure also provides antibodies comprising a heavy chain variable domain sequence that is at least 80%, at least 85%, at least 90%, or at least 95% identical to SEQ ID NO:1391 and a light chain variable domain sequence that is at least 80%, at least 85%, at least 90%, or at least 95% identical to SEQ ID NO:1393. The disclosure also provides antibodies comprising a heavy chain variable domain sequence that is at least 80%, at least 85%, at least 90%, or at least 95% identical to SEQ ID NO:1394 and a light chain variable domain sequence that is at least 80%, at least 85%, at least 90%, or at least 95% identical to SEQ ID NO:1392. The disclosure also provides antibodies comprising a heavy chain variable domain sequence that is at least 80%, at least 85%, at least 90%, or at least 95% identical to SEQ ID NO:1394 and a light chain variable domain sequence that is at least 80%, at least 85%, at least 90%, or at least 95% identical to SEQ ID NO:1393. The disclosure also provides antibodies comprising a heavy chain variable domain sequence that is at least 80%, at least 85%, at least 90%, or at least 95% identical to SEQ ID NO:1395 and a light chain variable domain sequence that is at least 80%, at least 85%, at least 90%, or at least 95% identical to SEQ ID NO:1386. The disclosure also provides antibodies comprising a heavy chain variable domain sequence that is at least 80%, at least 85%, at least 90%, or at least 95% identical to SEQ ID NO:1396 and a light chain variable domain sequence that is at least 80%, at least 85%, at least 90%, or at least 95% identical to SEQ ID NO:1386. The disclosure also provides antibodies comprising a heavy chain variable domain sequence that is at least 80%, at least 85%, at least 90%, or at least 95% identical to SEQ ID NO:1397 and a light chain variable domain sequence that is at least 80%, at least 85%, at least 90%, or at least 95% identical to SEQ ID NO:1386. The disclosure also provides antibodies comprising a heavy chain variable domain sequence that is at least 80%, at least 85%, at least 90%, or at least 95% identical to SEQ ID NO:1398 and a light chain variable domain sequence that is at least 80%, at least 85%, at least 90%, or at least 95% identical to SEQ ID NO:1399. The disclosure also provides antibodies comprising a heavy chain variable domain sequence that is at least 80%, at least 85%, at least 90%, or at least 95% identical to SEQ ID NO:1400 and a light chain variable domain sequence that is at least 80%, at least 85%, at least 90%, or at least 95% identical to SEQ ID NO:1399. The disclosure also provides antibodies comprising a heavy chain variable domain sequence that is at least 80%, at least 85%, at least 90%, or at least 95% identical to SEQ ID NO:1401 and a light chain variable domain sequence that is at least 80%, at least 85%, at least 90%, or at least 95% identical to SEQ ID NO:1399. The disclosure also provides antibodies comprising a heavy chain variable domain sequence that is at least 80%, at least 85%, at least 90%, or at least 95% identical to SEQ ID NO:1398 and a light chain variable domain sequence that is at least 80%, at least 85%, at least 90%, or at least 95% identical to SEQ ID NO:1382. The disclosure also provides antibodies comprising a heavy chain variable domain sequence that is at least 80%, at least 85%, at least 90%, or at least 95% identical to SEQ ID NO:1400 and a light chain variable domain sequence that is at least 80%, at least 85%, at least 90%, or at least 95% identical to SEQ ID NO:1382. The disclosure also provides antibodies comprising a heavy chain variable domain sequence that is at least 80%, at least 85%, at least 90%, or at least 95% identical to SEQ ID NO:1401 and a light chain variable domain sequence that is at least 80%, at least 85%, at least 90%, or at least 95% identical to SEQ ID NO:1382. The disclosure also provides antibodies comprising a heavy chain variable domain sequence that is at least 80%, at least 85%, at least 90%, or at least 95% identical to SEQ ID NO:1402 and a light chain variable domain sequence that is at least 80%, at least 85%, at least 90%, or at least 95% identical to SEQ ID NO:1374. The disclosure also provides antibodies comprising a heavy chain variable domain sequence that is at least 80%, at least 85%, at least 90%, or at least 95% identical to SEQ ID NO:1402 and a light chain variable domain sequence that is at least 80%, at least 85%, at least 90%, or at least 95% identical to SEQ ID NO:1403. The disclosure also provides antibodies comprising a heavy chain variable domain sequence that is at least 80%, at least 85%, at least 90%, or at least 95% identical to SEQ ID NO:1404 and a light chain variable domain sequence that is at least 80%, at least 85%, at least 90%, or at least 95% identical to SEQ ID NO:1374. The disclosure also provides antibodies comprising a heavy chain variable domain sequence that is at least 80%, at least 85%, at least 90%, or at least 95% identical to SEQ ID NO:1404 and a light chain variable domain sequence that is at least 80%, at least 85%, at least 90%, or at least 95% identical to SEQ ID NO:1403. The disclosure also provides antibodies comprising a heavy chain variable domain sequence that is at least 80%, at least 85%, at least 90%, or at least 95% identical to SEQ ID NO:1405 and a light chain variable domain sequence that is at least 80%, at least 85%, at least 90%, or at least 95% identical to SEQ ID NO:1406. The disclosure also provides antibodies comprising a heavy chain variable domain sequence that is at least 80%, at least 85%, at least 90%, or at least 95% identical to SEQ ID NO:1405 and a light chain variable domain sequence that is at least 80%, at least 85%, at least 90%, or at least 95% identical to SEQ ID NO:1407.

[0027] Table 1 provides a summary of the TIGIT-specific antibodies described herein:

### Pharmaceutical Compositions

[0028] Pharmaceutical compositions comprising the antibodies or antibody fragments of the present disclosure are also contemplated and can be used in the methods disclosed herein. Pharmaceutical compositions can comprise one or more of the antibodies or antibody fragments described herein and a pharmaceutically acceptable carrier or excipient. Although the carrier or excipient may facilitate administration, it should not itself induce the production of antibodies harmful to the subject or individual receiving the composition; nor should it be toxic. Suitable carriers may be large, slowly metabolized macromolecules such as proteins, polypeptides, liposomes, polysaccharides, polylactic acids, polyglycolic acids, polymeric amino acids, amino acid copolymers and inactive virus particles, and are known to one of skill in the art.

[0029] The antibodies or an antigen binding fragments described herein, or the pharmaceutical compositions disclosed herein, may be administered by any number of routes including, but not limited to, oral, intravenous, intramuscular, intra-arterial, intramedullary, intraperitoneal, intrathecal, intraventricular, transdermal, transcutaneous, topical, subcutaneous, intranasal, enteral, sublingual, intravaginal or rectal routes. Typically, the therapeutic compositions may be prepared as injectables, either as liquid solutions or suspensions. Solid forms suitable for solution in, or suspension in, liquid vehicles prior to injection may also be prepared.

[0030] In one embodiment, the antibody, or an antigen binding fragment thereof, or pharmaceutical composition is administered intravenously. In another embodiment, the antibody, or an antigen binding fragment thereof, or pharmaceutical composition is administered by intravenous infusion.

[0031] Direct delivery of the compositions will generally be accomplished by injection, subcutaneously, intraperitoneally, intravenously or intramuscularly, or delivered to the interstitial space of a tissue. The compositions can also be administered into a lesion. Dosage treatment may be a single dose schedule or a multiple dose schedule. Known antibody-based pharmaceuticals provide guidance relating to frequency of administration e.g., whether a pharmaceutical should be delivered daily, weekly, monthly, etc. Frequency and dosage may also depend on the severity of symptoms.

[0032] It will be appreciated that the active ingredient in the composition will be an antibody molecule, an antibody fragment or variants and derivatives thereof. As such, it will be susceptible to degradation in the gastrointestinal tract. Thus, if the composition is to be administered by a route using the gastrointestinal tract, the composition will need to contain agents which protect the antibody from degradation, but which release the antibody once it has been absorbed from the gastrointestinal tract.

[0033] The methods of the present invention can use an antibody, or an antigen binding fragment thereof, as described above, alone or in combination with other pharmaceutically active compounds, to treat conditions such as those disclosed hereinabove. The additional pharmaceutically active compound(s) can be administered simultaneously (either in the same dosage form or in separate dosage forms) or sequentially. Accordingly, in one embodiment, the present invention comprises methods for treating a condition by administering to the subject a therapeutically effective amount of an antibody, or an antigen binding fragment thereof, of the present invention and one or more additional pharmaceutically active compounds.

[0034] In some embodiments, the antibody, or an antigen binding fragment thereof, of the present invention is used in combination with existing TIGIT-related disease therapies.

### EXAMPLES

[0035] The following examples put forth so as to provide those of ordinary skill in the art with a complete description of how to make and use the present disclosure, and is not intended to limit the scope of what the inventors regard as their disclosure nor is it intended to represent that the experiment below is all or the only experiment that could be performed. Efforts have been made to ensure accuracy with respect to numbers used (e.g. amounts, temperature, etc.) but some experimental errors and deviations should be accounted for. Unless indicated otherwise, parts are parts by weight, molecular weight is weight average molecular weight, temperature is in degrees Centigrade, and pressure is at or near atmospheric.

### Example 1: Isolation of Murine Anti-Human TIGIT Antibodies

### Immunization, & Single Cell Suspension Generation

[0036] Recombinant human TIGIT His tagged, catalog no: TIT-H52H3, ACROBiosystems, Beijing, China, SEQ ID NO:2) was used to immunize young C57/BL6 mice each with 80 μg of the protein in Sigma Adjuvant System® (Sigma-Aldrich, St. Louis, Mo.) over a period of 35 days using a rapid immunization protocol of Antibody Solutions (Sunnyvale, Calif.). The lymph nodes were harvested on day 35. Single cell suspension of the lymph node was generated, and the suspension was filtered through a 70 μm mesh (BD Bioscience) to remove clumps.

### Plasma Cell Isolation, Antibody Capture, and Antigen Interrogation

[0037] The filtered lymphocyte suspension was enriched for plasma cells actively secreting IgGs using a kit based on cell surface expression of CD138 (Miltenyi, Auburn, Calif.). Using a method described in U.S. Pat. No. 9,328,172, freshly enriched plasma cells were deposited on a PDMS device to allow a single cell settled in the microwells on the device. Antibody secreted from each plasma cell was captured on a derivatized microscope slide. Antigen-specific antibody secreting cells were identified by interrogating the antibody capture slide with varying concentrations of fluorescently labeled human TIGIT protein tagged with human Fc (ACROBiosystems, Beijing, China, catalog no: TIT-H5254, SEQ ID NO:3). Labeling was done using a kit (AnaSpec, Fremont, Calif., AS-72046, AnaTag™ HiLyte™ Fluor 555 Microscale Protein Labeling Kit *Ultra Convenient*).

mRNA Capture

[0038] After antibody capture, the medium was removed, and replaced with lysis buffer followed by prompt closure of the top of the microwells with a custom oligonucleotide microarray (Agilent, Santa Clara, Calif.). This procedure was previously described in U.S. Pat. No. 9,328,172. The custom oligonucleotide microarray is prepared such that each feature contains not only a unique tag specifying its coordinate but also capture probes for all subclasses (1, 2a, 2b, and 3) of murine IgG heavy chain, murine Ig kappa light chain.

cDNA Synthesis, PCR Amplification, and Next Generation Sequencing

[0039] Captured mRNA on the custom microarray was further processed to synthesize cDNA of each mRNA incorporating the unique tag originally on each feature. The cDNA is then amplify using a Taq polymerase (Promega, Madison, Wis.) and appropriate set of primers to allow amplification of the following genes: variable domain of IgG heavy chain subclasses and variable domain of Ig kappa light chain. Though now released from cells, these fragments of each gene are now labeled with the unique tag from the custom oligonucleotide microarray manifesting their originating locations. The amplicons were further manipulated to have appropriate sequence attached at both ends to enable sequencing on an Illumina MiSeq instrument using 2×250 bp chemistry at SeqMatic LLC (Fremont, Calif.).

### Bioinformatic Analysis of Images and DNA Sequences

[0040] Sequencing reads from MiSeq were processed and the embedded tag in each read was identified and converted into coordinates. The coordinates were plotted to yield a synthetic map of the mRNA recovered. Most of the coordinates form clusters that designate the location of the originating cell for the recovered mRNA sequences. Next, CDR3 motif present in each read with the coordinates was identified and collated according to the clusters that matched the location of an antibody spot visualized by an appropriate fluorescently labeled secondary antibody. Identical or nearly identical CDR3s for a given antibody spot were organized and form consistent pair of V_{H} and V_{L} sequences. The remaining part of V_{H} or V_{L} sequence containing the identified CDR3s was identified and the associated sequencing reads were assembled into full-length cDNA sequences for V_{H} and V_{L}. The pair of full-length cDNA was correlated with the affinity measurements associated with each of the antigen-specific antibody spot.

### Example 2: Molecular Reconstruction, Recombinant Expression, and Humanization of Anti-TIGIT Antibodies

[0041] A select subset of paired V_{H} and V_{L} anti-TIGIT antibody sequences was used to synthesize corresponding gene fragments by a service provider according to the known art. The resulting gene fragments were cloned into appropriate plasmid vectors to be in-frame fused with human IgG1 Fc or human kappa constant region, respectively, and transfected into an appropriate mammalian host, such as HEK293, for recombinant expression to produce a chimeric antibody preparation in full-IgG format. The antibody preparations were characterized by measurements at OD280 to assess the amount produced and by gel electrophoresis on PAGE to assess the size of the antibody chains produced. Chimeric or humanized antibodies described herein can be prepared based on the sequence of a murine monoclonal antibody generated as described above. To create a chimeric antibody, the murine variable regions were linked to human constant regions using methods known in the art (see e.g., U.S. Pat. No. 4,816,567 to Cabilly et al.). To create a humanized antibody, the murine CDR regions were inserted into a human framework using methods known in the art (see e.g., U.S. Pat. No. 5,225,539 to Winter, and U.S. Pat. Nos. 5,530,101; 5,585,089; 5,693,762 and 6,180,370 to Queen et al.).

### Example 3: Characterization of Recombinant Anti-TIGIT Antibodies

[0042] The recombinantly expressed antibodies were used to assess binding activity to TIGIT by conventional ELISA according to the known art. Recombinant human TIGIT was coated onto ELISA plates to detect binding at serially diluted concentrations of the anti-TIGIT antibody preparations (FIG. 1). Each antibody's EC50 value is shown in Table 2. Anti-TIGIT antibodies' blockade activity was assessed using engineered cell lines, kit reagents (TIGIT/CD155 Blockade Bioassay, J2201, Promega, Madison, Wis.), and a luminometer (Promega, Madison, Wis.) and the results were used to compare against benchmark antibodies with known blockade activity (FIG. 2). Their EC50 values are shown in table 3. Similarly, these antibodies were assessed for their ability to synergize with an anti-PD-1 antibody using a PD-1+TIGIT combination bioassay (Cat. No. J2211 Promega, Madison, Wis.). The results are shown in FIG. 3.

[0043] Antibodies recovered from the antibody campaign described above are listed herein. The CDR sequences and the V_{H} and V_{L} sequences for the anti-TIGIT antibodies described herein are depicted in Tables 4 and 5, respectively.

TABLE 2

| Antibody | EC50 (nM) |
|---|---|
| Ga001 | 5.03 |
| Ga249 | 1.22 |
| Ga255 | 0.96 |
| Ga333 | 1.08 |
| Ga433 | 1.10 |
| Ga461 | 4.55 |
| Ga487 | 1.96 |
| Ga495 | 0.69 |
| Ga496 | 0.67 |
| Ga485 | 0.79 |
| Ga498 | 0.82 |

TABLE 3

| | Blockade |
|---|---|
| Antibody | EC50 (nM) |
| Ga001 | 26.59 |
| Ga249 | 28.08 |
| Ga255 | 33.35 |
| Ga333 | 42.22 |
| Ga433 | 25.19 |
| MK-7683 | 24.84 |

TABLE 4
CDR sequences of mAbs generated against human TIGIT
(SEQ ID Nos for each listed sequence are provided in parenthesis)

| mAb AA ID | HCDR1 | HCDR2 | HCDR3 | LCDR1 | LCDR2 | LCDR3 |
|---|---|---|---|---|---|---|
| SCT-Ga001 | GYAFTNYL | INPGSGGS | ARTGVYGNFLIFDY | QSLLNSGIQKNY | GAS | QNDHRYPFT |
| | (687) | (688) | (689) | (690) | (691) | (692) |
| SCT-Ga002 | GYSITNGNHW | ITSSGRT | AREGGWLPPV | QSLLDSDGKTY | LVS | WQGTHFPYT |
| | (693) | (694) | (695) | (696) | (697) | (698) |
| SCT-Ga003 | GYSITNGNHW | ITSSGRT | AREGGWLPPV | QSLLDSDGKTY | LVS | WQGTHFPYT |
| | (693) | (694) | (695) | (696) | (697) | (698) |
| SCT-Ga004 | GYSITNGNHW | ITSSGRT | AREGGWLPPV | QSLLDSDGKTY | LVS | WQGTHFPYT |
| | (693) | (694) | (695) | (696) | (697) | (698) |
| SCT-Ga005 | GYSITNGNHW | ITSSGRT | AREGGWLPPV | QSLLDSDGKTY | LVS | WQGTHFPYT |
| | (693) | (694) | (695) | (696) | (697) | (698) |
| SCT-Ga006 | GYSITNGNHW | ITSSGRT | AREGGWLPPV | QSLLDSDGKTY | LVS | WQGTHFPYT |
| | (693) | (694) | (695) | (696) | (697) | (698) |
| SCT-Ga007 | GFTFTDHY | IRNKVNGYTT | ARYIPYYDPFDY | QDINSY | RAN | LQYDELYT |
| SCT-Ga008 | (699) | (700) | (701) | (702) | (703) | (704) |
| | GYSITNGNHW | ITSSGRT | SREGGWLPPV | QSLLDSDGKTY | LVS | WQGTHFPYT |
| | (693) | (694) | (705) | (696) | (697) | (698) |
| SCT-Ga009 | GYTFTDYY | INPYNGGT | AREGTD | QSLLDSDGKTY | LVS | WQGTHFPWT |
| | (706) | (707) | (708) | (696) | (697) | (709) |
| SCT-Ga010 | GYSITNGNHW | ITSSGRT | AREGGWLPPV | QSLLDSDGKTY | LVS | WQGTHFPYT |
| | (693) | (694) | (695) | (696) | (697) | (698) |
| SCT-Ga011 | GYSITNGNHW | ISSSGRI | AREGGWLPPV | QSLLDSDGKTY | LVS | WQGTHFPYT |
| | (693) | (710) | (695) | (696) | (697) | (698) |
| SCT-Ga012 | GFTFSNYG | ISTGGSYT | ARPHYYGSSSGNYFDY | EDIYNR | GAT | QQYWSTPWT |
| | (711) | (712) | (713) | (714) | (715) | (716) |
| SCT-Ga013 | GYSITHGNHW | ISSSGRI | AREGGWLPPV | QSLLDSDGKTY | LVS | WQGTHFPYT |
| | (717) | (710) | (695) | (696) | (697) | (698) |
| SCT-Ga014 | GYSITNGNHW | ITSSGRT | AREGGWLPPV | QSLLDSDGKTY | LVS | WQGTHFPYT |
| | (693) | (694) | (695) | (696) | (697) | (698) |
| SCT-Ga015 | GYSITNGNHW | IRSSGST | AREGGWLPPV | QSLLDSDGKTY | LLS | WQGTHFPYT |
| | (693) | (718) | (695) | (696) | (719) | (698) |
| SCT-Ga016 | GFSLTSYV | IWTGGGT | ARTRAYYSNWGYFDV | QSVLYSSNQKNY | WAS | HQYLSSYT |
| | (720) | (721) | (722) | (723) | (724) | (725) |
| SCT-Ga017 | GYSITNGNHW | ISSSGRT | AREGGWLPPV | QSLLDSDGKTY | LVS | WQGTHFPYT |
| | (693) | (726) | (695) | (696) | (697) | (698) |
| SCT-Ga018 | GYSITNGNHW | ITSSGRT | AREGGWLPPV | QSLLDSDGKTY | LVS | WQGTHFPYT |
| | (693) | (694) | (695) | (696) | (697) | (698) |
| SCT-Ga019 | GYSITSGYY | ISYDGSN | ARGLYYDYDDYFDY | QDINKY | YTS | LQYDNLWT |
| | (727) | (728) | (729) | (730) | (731) | (732) |
| SCT-Ga020 | GYSITNGNHW | IRSSGST | TREGGWLPPV | QSLLDSDGKTY | LVS | WQGTHFPYT |
| | (693) | (718) | (733) | (696) | (697) | (698) |
| SCT-Ga021 | GYSITNGNHW | ITSSGRI | AREGGWLPPV | QSLFDSDGKTY | LVS | WQGTHFPYT |
| | (693) | (734) | (695) | (735) | (697) | (698) |
| SCT-Ga022 | GYSITNGNHW | ISSSGRT | AREGGWLPPV | QSLLDSDGKTY | LVS | WQGTHFPYT |
| | (693) | (726) | (695) | (696) | (697) | (698) |
| SCT-Ga023 | GYSITNGNHW | ISSSGST | AREGGWLPPV | QSLLDSDGKTY | LVS | WQGTHFPYT |
| | (693) | (736) | (695) | (696) | (697) | (698) |
| SCT-Ga024 | GYSITNGNHW | ITSSGRT | AREGGWLPPV | QSLLDSDGKTY | LVS | WQGTHFPYT |
| | (693) | (694) | (695) | (696) | (697) | (698) |
| SCT-Ga025 | GYSITNGNHW | IRSSGST | TREGGWLPPV | QSLLDSDGKTY | LVS | WQGTHFPYT |
| | (693) | (718) | (733) | (696) | (697) | (698) |
| SCT-Ga026 | GYSITNGNHW | ITSSGRT | TREGGWLPPV | QSLLDIDGKTY | LVS | WQGTHFPYT |
| | (693) | (694) | (733) | (737) | (697) | (698) |
| SCT-Ga027 | GYTFTTYG | INTYSGVP | ARYDYDVGFAY | QSLVHSNGNTY | KIS | SQSTHVPA |
| | (738) | (739) | (740) | (741) | (742) | (743) |
| SCT-Ga028 | GYSITNGNHW | ISSSGRT | AREGGWLPPV | QSLLDSDGKTY | LVS | WQGTHFPYT |
| | (693) | (726) | (695) | (696) | (697) | (698) |
| SCT-Ga029 | GYTFTTYG | INTFSRVP | ARYDYDVGFAY | QSLVHSNGNTY | KVS | SQSTHVPT |
| | (738) | (744) | (740) | (741) | (745) | (746) |
| SCT-Ga030 | GYSITNGNHW | ITSSGRT | SREGGWLPPV | QSLLDSDGKTY | LVS | WQGTHFPYT |
| | (693) | (694) | (705) | (696) | (697) | (698) |
| SCT-Ga031 | GISITTGNYK | IYYSGTI | ARETVLRVFDY | QDVGTA | SAS | QQHYSSPRT |
| | (747) | (748) | (749) | (750) | (751) | (752) |
| SCT-Ga032 | GYSITNGHHW | ISSSGST | AREGGWLPPV | QSLLDSDGKTY | LVS | WQGTHFPYT |
| | (753) | (736) | (695) | (696) | (697) | (698) |
| SCT-Ga033 | GYSITNGNHW | ITSSGRT | AREGGWLPPV | QSLLDSDGKTY | LVS | WQGTHFPYT |
| | (693) | (694) | (695) | (696) | (697) | (698) |
| SCT-Ga034 | GYSITNGNHW | ISSSGRI | AREGGWLPPV | QSLLDSDGKTY | LVS | WQGTHFPYT |
| | (693) | (710) | (695) | (696) | (697) | (698) |
| SCT-Ga035 | GYSITNGNHW | IRSSGST | AREGGWLPPV | QSLLDSDGKTY | LVS | WQGTHFPYT |
| | (693) | (718) | (695) | (696) | (697) | (698) |
| SCT-Ga036 | GYSITNGNHW | ITSSGRT | AREGGWLPPV | QSLLDSDGKTY | LVS | WQGTHFPYT |
| | (693) | (694) | (695) | (696) | (697) | (698) |
| SCT-Ga037 | GYTFTDHT | IYPRDGST | ARRVVASGMDY | QDVSTA | SAS | QQHYSTPYT |
| | (754) | (755) | (756) | (757) | (751) | (758) |
| SCT-Ga038 | GYAFTNYL | INPGSGGS | ARTGVYGNFLIFDY | QSLLNSGIQKNY | GAS | QNDHRYPFT |
| | (687) | (688) | (689) | (690) | (691) | (692) |
| SCT-Ga039 | GYSITNGNHW | ISSSGRT | AREGGWLPPV | QSLLDSDGKTY | LVS | WQGTHFPYT |
| | (693) | (726) | (695) | (696) | (697) | (698) |
| SCT-Ga040 | GYSITNGNHW | ITSSGRT | AREGGWLPPV | QSLLDSDGKTY | LVS | WQGTHFPYT |
| | (693) | (694) | (695) | (696) | (697) | (698) |
| SCT-Ga041 | GYSITNGNHW | ISSSGRT | AREGGWLPPV | QSLLDSDGKTY | LVS | WQGTHFPYT |
| | (693) | (726) | (695) | (696) | (697) | (698) |
| SCT-Ga042 | GYSITNGNHW | ITSSGRT | AREGGWLPPV | QSLLDSDGKTY | LVS | WQGTHFPYT |
| | (693) | (694) | (695) | (696) | (697) | (698) |
| SCT-Ga043 | GYSITNGNHW | IRSSGST | TREGGWLPPV | QSLLDRDGKTY | LVS | WQGTHFPYT |
| | (693) | (718) | (733) | (759) | (697) | (698) |
| SCT-Ga044 | GYSITNGNHW | IRSSGST | TREGGWLPPV | QSLLDSDGKTY | LVS | WQGTHFPYT |
| | (693) | (718) | (733) | (696) | (697) | (698) |
| SCT-Ga045 | GYSITNGNHW | ISSSGRT | AREGGWLPPV | QSLLDRDGKTY | LVS | WQGTHFPYT |
| | (693) | (726) | (695) | (759) | (697) | (698) |
| SCT-Ga046 | GYSITNGNHW | ITSSGRT | AREGGWLPPV | QSLLDSDGKTY | LVS | WQGTHFPYT |
| | (693) | (694) | (695) | (696) | (697) | (698) |
| SCT-Ga047 | GYSITNGNHW | IRSSGST | AREGGWLPPV | QSLLDSDGKTY | LVS | WQGTHFPYT |
| | (693) | (718) | (695) | (696) | (697) | (698) |
| SCT-Ga048 | GYSITSGNHW | ISSSGRI | AREGGWLPPV | QSLLDSDGKTY | LVS | WQGTHFPYT |
| | (760) | (710) | (695) | (696) | (697) | (698) |
| SCT-Ga049 | GISITTGNYK | IYYSGTI | ARETVLRVFDY | QDVSTA | SAS | QQHYSSPRT |
| | (747) | (748) | (749) | (757) | (751) | (752) |
| SCT-Ga050 | GYSITNGNHW | ITSSGRT | AREGGWLPPV | QSLLDSDGKTY | LVS | WQGTHFPYT |
| | (693) | (694) | (695) | (696) | (697) | (698) |
| SCT-Ga051 | GYTFTDYY | IFPGSGST | ARFTV | QSLLDSDGKTY | LVS | WQGTHFPHT |
| | (706) | (761) | (762) | (696) | (697) | (763) |
| SCT-Ga052 | GYTFTDYY | IYPGSGNT | ARVTYYGGYFDY | QDISNY | YTS | QQGNTLPFT |
| | (706) | (764) | (765) | (766) | (731) | (767) |
| SCT-Ga053 | GYSITNGNHW | ISSSGRT | AREGGWLPPV | QSLLDSDGKTY | LVS | WQGTHFPYT |
| | (693) | (726) | (695) | (696) | (697) | (698) |
| SCT-Ga054 | GYSITNGNHW | IRSSGST | AREGGWLPPV | QSLLDSDGKTY | LVS | WQGTHFPYT |
| | (693) | (718) | (695) | (696) | (697) | (698) |
| SCT-Ga055 | GYILSGYW | IFPGSGST | ARIRITTVPYFDF | QDVSKA | WAS | QQHYSTPWT |
| | (768) | (761) | (769) | (770) | (724) | (771) |
| SCT-Ga056 | GYTFTSYW | INPSNGVT | ARDYDYFDY | VNIHNY | NAK | QHFWSTPYT |
| | (772) | (773) | (774) | (775) | (776) | (777) |
| SCT-Ga057 | GYSITSAYY | ISYDGTN | GRGRPFVPY | QNVGSN | SAS | QQYNNYPFT |
| | (778) | (779) | (780) | (781) | (751) | (782) |
| SCT-Ga058 | GYSITNGNHW | ITSSGRT | AREGGWLPPV | QSLLDSDGKTY | LVS | WQGTHFPYT |
| | (693) | (694) | (695) | (696) | (697) | (698) |
| SCT-Ga059 | GYTFTDHT | IYPRDGST | ARRALPYFDC | QDVFTA | SAS | QQHYSTPLT |
| | (754) | (755) | (783) | (784) | (751) | (785) |
| SCT-Ga060 | GYSITNGNHW | ITSSGRT | AREGGWLPPV | QSLLDSDGKTY | LVS | WQGTHFPYT |
| | (693) | (694) | (695) | (696) | (697) | (698) |
| SCT-Ga061 | GYSITNGNHW | ISSSGRT | AREGGWLPPV | QSLLDSDGKTY | LVS | WQGTHFPYT |
| | (693) | (726) | (695) | (696) | (697) | (698) |
| SCT-Ga062 | GISITTGNYK | IYYSGTI | ARETVLRVFDY | QDVSTA | SAS | QQHYSSPRT |
| | (747) | (748) | (749) | (757) | (751) | (752) |
| SCT-Ga063 | GYAFTNYL | INPGSGGS | ARTGVYGNFLIFDY | QSLLNSGVQKNY | GAS | QNDHRYPFT |
| | (687) | (688) | (689) | (786) | (691) | (692) |
| SCT-Ga064 | GYSITNGNHW | ITSSGRT | AREGGWLPPV | QSLLDSDGKTY | LVS | WQGTHFPYT |
| | (693) | (694) | (695) | (696) | (697) | (698) |
| SCT-Ga065 | GYAFTNYL | INPGSGGS | ARTGVYANFLIFDY | QSLLNSGIQKNY | GAS | QNDHRYPFT |
| | (687) | (688) | (787) | (690) | (691) | (692) |
| SCT-Ga066 | GYSITNGNHW | ISSSGRT | AREGGWLPPV | QSLLDSDGKTY | LVS | WQGTHFPYT |
| | (693) | (726) | (695) | (696) | (697) | (698) |
| SCT-Ga067 | GYSITNGNHW | ITSSGRT | AREGGWLPPV | QSLLDSDGKTY | LVS | WQGTHFPYT |
| | (693) | (694) | (695) | (696) | (697) | (698) |
| SCT-Ga068 | GYSITNGNHW | ITSSGRT | AREGGWLPPV | QSLLDSDGKTY | LVS | WQGTHFPYT |
| | (693) | (694) | (695) | (696) | (697) | (698) |
| SCT-Ga069 | GYSITNGNHW | ITSSGRT | AREGGWLPPV | QSLLDSDGKTY | LVS | WQGTHFPYT |
| | (693) | (694) | (695) | (696) | (697) | (698) |
| SCT-Ga070 | GYSITNGNHW | ITSSGRT | AREGGWLPPV | QSLLDSDGKTY | LVS | WQGTHFPYT |
| | (693) | (694) | (695) | (696) | (697) | (698) |
| SCT-Ga071 | GYSITNGNHW | ITSSGRT | AREGGWLPPV | QSLLDSDGKTY | LVS | WQGTHFPYT |
| | (693) | (694) | (695) | (696) | (697) | (698) |
| SCT-Ga072 | GYSITNGNHW | ITSSGRT | AREGGWLPPV | QSLLDSDGKTY | LVS | WQGTHFPYT |
| | (693) | (694) | (695) | (696) | (697) | (698) |
| SCT-Ga073 | GYSITNGNHW | ITSSGRT | AREGGWLPPV | QSLLDSDGKTY | LLS | WQGTHFPYT |
| | (693) | (694) | (695) | (696) | (719) | (698) |
| SCT-Ga074 | GYTFTSYW | INPSNGGT | ARRTTVLAGPYFDY | QNINVW | KAS | QQGQSYPLT |
| | (772) | (788) | (789) | (790) | (791) | (792) |
| SCT-Ga075 | GYSITNGNHW | ITSSGRT | AREGGWLPPV | QSLLDSDGKTY | LVS | WQGTHFPYT |
| | (693) | (694) | (695) | (696) | (697) | (698) |
| SCT-Ga076 | GYSITNGNHW | ITSSGRT | AREGGWLPPV | QSLLDSDGKTY | LVS | WQGTHFPYT |
| | (693) | (694) | (695) | (696) | (697) | (698) |
| SCT-Ga077 | GYSITNGNHW | ITSSGRT | AREGGWLPPV | QSLLDSDGQTY | LVS | WQGTHFPYT |
| | (693) | (694) | (695) | (793) | (697) | (698) |
| SCT-Ga078 | GYSITNGNHW | IRSSGST | TREGGWLPPV | QSLLDSDGKTY | LVS | WQGTHFPYT |
| | (693) | (718) | (733) | (696) | (697) | (698) |
| SCT-Ga079 | GYSITNGNHW | IRSSGST | AREGGRLPPV | QSLLDSDGKTY | LVS | WQGTHFPYT |
| | (693) | (718) | (794) | (696) | (697) | (698) |
| SCT-Ga080 | GYSITNGNHW | ITSSGRT | AREGGWLPPV | QSLLDSDGKTY | LVS | WQGTHFPYT |
| | (693) | (694) | (695) | (696) | (697) | (698) |
| SCT-Ga081 | GYSISNGNHW | ITSSGRT | AREGGWLPPV | QSLLDSDGKTY | LVS | WQGTHFPYT |
| | (795) | (694) | (695) | (696) | (697) | (698) |
| SCT-Ga082 | GYSITNGNHW | ISSSGRT | AREGGWLPPV | QSLLDSDGKTY | LVS | WQGTHFPYT |
| | (693) | (726) | (695) | (696) | (697) | (698) |
| SCT-Ga083 | GYSITNGNHW | ISSSGRI | AREGGWLPPV | QSLLDSDGKTY | LVS | WQGTHFPYT |
| | (693) | (710) | (695) | (696) | (697) | (698) |
| SCT-Ga084 | GYSITNGNHW | ITSSGRT | AREGGWLPPV | QSLLDSDGKTY | LVS | WQGTHFPYT |
| | (693) | (694) | (695) | (696) | (697) | (698) |
| SCT-Ga085 | GYSITNGNHW | ISSSGRI | AREGGWLPPV | QSLLDSDGKTY | LVS | WQGTHFPYT |
| | (693) | (710) | (695) | (696) | (697) | (698) |
| SCT-Ga086 | GYSITNGNHW | ITSSGRT | AREGGWLPPV | QSLLDSDGKTY | LVS | WQGTHFPYT |
| | (693) | (694) | (695) | (696) | (697) | (698) |
| SCT-Ga087 | GFITSRYI | ISGGGGNT | ARWLPSYYAMDY | QDIGSS | ATS | LQYASSPWT |
| | (796) | (797) | (798) | (799) | (800) | (801) |
| SCT-Ga088 | GFITSRYI | ISGGGGNT | ARWLPSYYAMDY | QNINIW | KAS | QQGQSYPYT |
| | (796) | (797) | (798) | (802) | (791) | (803) |
| SCT-Ga089 | GYSITNGNHW | ITSSGRT | AREGGWLPPV | QSLLDSDGKTY | LVS | WQGTHFPYT |
| | (693) | (694) | (695) | (696) | (697) | (698) |
| SCT-Ga090 | GYSITNGNHW | ITSSGRT | AREGGWLPPV | QSLLDSDGKTY | LVS | WQGTHFPYT |
| | (693) | (694) | (695) | (696) | (697) | (698) |
| SCT-Ga091 | GYSITNGNHW | IRSSGST | AREGGWLPPV | QSLLDSDGKTY | LVS | WQGTHFPYT |
| | (693) | (718) | (695) | (696) | (697) | (698) |
| SCT-Ga092 | GFITSSYT | ISGGGGNT | ARWLLTYYAMDY | QDIGSS | ATS | LQYVSCPWT |
| | (804) | (797) | (805) | (799) | (800) | (806) |
| SCT-Ga093 | GYTFTDCY | IFPGSDFT | ARYGLGHYFDY | QNINVW | KAS | QQGQSYPLT |
| | (807) | (808) | (809) | (790) | (791) | (792) |
| SCT-Ga094 | GYSITNGNHW | ITSSGRT | AREGGWLPPV | QSLLDSDGKTY | LVS | WQGTHFPYT |
| | (693) | (694) | (695) | (696) | (697) | (698) |
| SCT-Ga095 | GYTFTAYC | IFPGSGST | ARYGLGHYFDY | QNINVW | KAS | QQGQSYPLT |
| | (810) | (761) | (809) | (790) | (791) | (792) |
| SCT-Ga096 | GYSITNGNHW | ITSSGRT | SREGGWFPPV | QSLLDSDGKTY | LVS | WQGTHFPYT |
| | (693) | (694) | (811) | (696) | (697) | (698) |
| SCT-Ga097 | GYSITNGNHW | IRSSGST | TREGGWLPPV | QSLLDSDGKTY | LVS | WQGTHFPYT |
| | (693) | (718) | (733) | (696) | (697) | (698) |
| SCT-Ga098 | GYSITNGNHW | ITSSGRT | TREGGWLPPV | QSLLDSDGKTY | LVS | WQGTHFPYT |
| | (693) | (694) | (733) | (696) | (697) | (698) |
| SCT-Ga099 | GYTFTSYW | INPSNGGT | ARRTTVLAGPYFDY | QNINVW | QAS | QQGQSYPLT |
| | (772) | (788) | (789) | (790) | (812) | (792) |
| SCT-Ga100 | GFTFSSYT | ISGGGGNT | ARWLLTYYAMDY | QNINVW | KAS | QQGQSYPYT |
| | (804) | (797) | (805) | (790) | (791) | (803) |
| SCT-Ga101 | GFTFSSYG | ISSGGSYT | ARHHYYYGSSYIFYFDV | QSVLYSSNQKNY | WAS | HQYLSSLT |
| | (813) | (814) | (815) | (723) | (724) | (816) |
| SCT-Ga102 | GFTFSSYT | ISGRGGNT | ARWLLTYYAMDY | QNINVW | KAS | QQGQSYPYT |
| | (804) | (817) | (805) | (790) | (791) | (803) |
| SCT-Ga103 | GFTFSSYT | ISGRGGNT | VRWLLTYYAMDY | QNINIW | KAS | QQGQSYPYT |
| | (804) | (817) | (818) | (802) | (791) | (803) |
| SCT-Ga104 | GFTFSSYT | ISGGGGNT | ARWLPTYYAMDY | QNINVW | KAS | QQGQSYPYT |
| | (804) | (797) | (819) | (790) | (791) | (803) |
| SCT-Ga105 | GYSFTTYG | INTYSGVP | ARYDYDVGFAY | QSLVHSNGNTY | KIS | SQSTHVPA |
| | (820) | (739) | (740) | (741) | (742) | (743) |
| SCT-Ga106 | GYSITHGNHW | ISSSGRI | AREGGWLPPV | QSLLDSDGKTY | LVS | WQGTHFPYT |
| | (717) | (710) | (695) | (696) | (697) | (698) |
| SCT-Ga107 | GYSITNGNHW | ITSSGRT | TREGGWLPPV | QSLLDSDGKTY | LVS | WQGTHFPYT |
| | (693) | (694) | (733) | (696) | (697) | (698) |
| SCT-Ga108 | GYSITNGNHW | ITSSGRI | AREGGWLPPV | QSLLDSDGKTY | LVS | WQGTHFPYT |
| | (693) | (734) | (695) | (696) | (697) | (698) |
| SCT-Ga109 | GYSITNGNHW | ISSSGRT | AREGGWLPPV | QSLLDSDGKTY | LVS | WQGTHFPYT |
| | (693) | (726) | (695) | (696) | (697) | (698) |
| SCT-Ga110 | GYSITNGNHW | ITSSGRT | AREGGWLPPV | QSLLDSDGKTY | LVS | WQGTHFPYT |
| | (693) | (694) | (695) | (696) | (697) | (698) |
| SCT-Ga111 | GYSITNGNHW | ITSSGRT | AREGGWLPPV | QSLLDSDGKTY | LVS | WQGTHFPYT |
| | (693) | (694) | (695) | (696) | (697) | (698) |
| SCT-Ga112 | GYAFTNYL | INPGSGGS | ARTGVYGNFLIFDY | QSLLNSGIQKNY | GAS | QNDHRYPFT |
| | (687) | (688) | (689) | (690) | (691) | (692) |
| SCT-Ga113 | GYSITNGNHW | ITSSGRT | TREGGWLPPV | QSLLDSDGKTY | LVS | WQGTHFPYT |
| | (693) | (694) | (733) | (696) | (697) | (698) |
| SCT-Ga114 | GYSITNGNHW | ITSSGRT | AREGGWLPPV | QSLLDSDGKTY | LVS | WQGTHFPYT |
| | (693) | (694) | (695) | (696) | (697) | (698) |
| SCT-Ga115 | GYSITNGNHW | ITSSGRT | AREGGWLPPV | QSLLDSDGKTY | LVS | WQGTHFPYT |
| | (693) | (694) | (695) | (696) | (697) | (698) |
| SCT-Ga116 | GYSITNGNHW | ITSSGRT | AREGGWLPPV | QSLLDSDGKTY | LVS | WQGTHFPYT |
| | (693) | (694) | (695) | (696) | (697) | (698) |
| SCT-Ga117 | GYSITNGNHW | IRSSGST | TREGGWLPPV | QSLLDSDGKTY | LVS | WQGTHFPYT |
| | (693) | (718) | (733) | (696) | (697) | (698) |
| SCT-Ga118 | GYSITNGNHW | ITSSGRT | AREGGWLPPV | QSLLDSDGKTY | LVS | WQGTHFPYT |
| | (693) | (694) | (695) | (696) | (697) | (698) |
| SCT-Ga119 | GYSITNGNHW | IRSSGRT | TREGGWLPPV | QSLLDSDGKTY | LVS | WQGTHFPYT |
| | (693) | (821) | (733) | (696) | (697) | (698) |
| SCT-Ga120 | GYSITNGNHW | ITSSGRT | AREGGWLPPV | QSLLDSDGKTY | LVS | WQGTHFPYT |
| | (693) | (694) | (695) | (696) | (697) | (698) |
| SCT-Ga121 | GYSITNGNHW | IRSSGST | TREGGWLPPV | QSLLDGDGRTY | LVS | WQGTHFPYT |
| | (693) | (718) | (733) | (822) | (697) | (698) |
| SCT-Ga122 | GYSITNGNHW | ITSSGRI | AREGGWLPPV | QSLLDSDGKTY | LVS | WQGTHFPYT |
| | (693) | (734) | (695) | (696) | (697) | (698) |
| SCT-Ga123 | GYSITNGNHW | ITSSGRT | TREGGWLPPV | QSLLDSDGKTY | LVS | WQGTHFPYT |
| | (693) | (694) | (733) | (696) | (697) | (698) |
| SCT-Ga124 | GYSITNGNHW | IRSSGST | SREGGWLPPV | QSLLDSDGKTY | LVS | WQGTHFPYT |
| | (693) | (718) | (705) | (696) | (697) | (698) |
| SCT-Ga125 | GYSITNGNHW | ITSSGRT | AREGGWLPPV | QSLLDSDGKTY | LVS | WQGTHFPYT |
| | (693) | (694) | (695) | (696) | (697) | (698) |
| SCT-Ga126 | GYSITNGNHW | IRSSGRT | TREGGRLPPV | QSLLDSDGKTY | LVS | WQGTHFPYT |
| | (693) | (821) | (823) | (696) | (697) | (698) |
| SCT-Ga127 | GYSITNGNHW | ITSSGRT | AREGGWFPPV | QSLLDSDGKTY | LVS | WQGTHFPYT |
| | (693) | (694) | (824) | (696) | (697) | (698) |
| SCT-Ga128 | GYSIINGNHW | ITSSGRT | AREGGWLPPV | QSLLDSDGKTY | LVS | WQGTHFPYT |
| | (825) | (694) | (695) | (696) | (697) | (698) |
| SCT-Ga129 | GYSITTGNHW | IRSSGST | TREGGLFPPV | QSLLDSDGKTY | LVS | WQGTHFPYT |
| | (826) | (718) | (827) | (696) | (697) | (698) |
| SCT-Ga130 | GYSITNGNHW | ITSNGRT | AREGGWLPPV | QSLLDSDGKTY | LVS | WQGTHFPYT |
| | (693) | (828) | (695) | (696) | (697) | (698) |
| SCT-Ga131 | GFTFSRYI | ITGGGGNT | ARWLPTYYAMDY | QDIGSS | ATY | LLYVNSPWT |
| | (796) | (829) | (819) | (799) | (830) | (831) |
| SCT-Ga132 | GYSITNGNHW | ITSSGRT | AREGGWLPPV | QSLLDSDGRTY | LVS | WQGTHFPYT |
| | (693) | (694) | (695) | (832) | (697) | (698) |
| SCT-Ga133 | GYSITNGNHW | IRSSGST | TREGGWLPPV | QSLLDSDGKTY | LVS | WQGTHFPYT |
| | (693) | (718) | (733) | (696) | (697) | (698) |
| SCT-Ga134 | GYTFTDYY | IFPGSDNT | ARYGLGHYFDY | QNINVW | TTS | QQGQSYPLT |
| | (706) | (833) | (809) | (790) | (834) | (792) |
| SCT-Ga135 | GYSITNGNHW | ITSSGRT | AREGGWLPPV | QSLLDSDGKTY | LVS | WQGTHFPYT |
| | (693) | (694) | (695) | (696) | (697) | (698) |
| SCT-Ga136 | GYTFTSYW | FYPGGGST | ARSYSNYVRFAY | QDVFTA | SAS | QQHYNTPLT |
| | (772) | (835) | (836) | (784) | (751) | (837) |
| SCT-Ga137 | GHTFTDYY | IFPGSGNT | AGYGLGHYFDN | SSISSSN | GTS | QQWSSYPLT |
| | (838) | (839) | (840) | (841) | (842) | (843) |
| SCT-Ga138 | GYSITNGNHW | IRSSGST | TREGGWLPPV | QSLLDSDGKTY | LVS | WQGTHFPYT |
| | (693) | (718) | (733) | (696) | (697) | (698) |
| SCT-Ga139 | GYSITNGNHW | ITSSGRT | AREGGWLPPV | QSLLDSDGKTY | LVS | WQGTHFPYT |
| | (693) | (694) | (695) | (696) | (697) | (698) |
| SCT-Ga140 | GYSITNGNHW | ITSSGRT | AREGGWLPPV | QSLLDSDGKTY | LVS | WQGTHFPYT |
| | (693) | (694) | (695) | (696) | (697) | (698) |
| SCT-Ga141 | GYSITNGNHW | IRSSGST | TREGGWLPPV | QSLLDSDGRTY | LVS | WQGTHFPYT |
| | (693) | (718) | (733) | (832) | (697) | (698) |
| SCT-Ga142 | GYSITNGKHW | IRSSGST | TREGGWLPPV | QSLLDSDGRTY | LVS | WQGTHFPYT |
| | (844) | (718) | (733) | (832) | (697) | (698) |
| SCT-Ga143 | GYSITNGNHW | ITSSGRT | AREGGWLPPV | QSLLDSDGKTY | LVS | WQGTHFPYT |
| | (693) | (694) | (695) | (696) | (697) | (698) |
| SCT-Ga144 | GYSITNGNHW | ISSSGRT | AREGGWLPPV | QSLLDSDGKTY | LVS | WQGTHFPYT |
| | (693) | (726) | (695) | (696) | (697) | (698) |
| SCT-Ga145 | GYSITNGNHW | ISSSGRT | AREGGWLPPV | QSLLDSDGKTY | LVS | WQGTHFPYT |
| | (693) | (726) | (695) | (696) | (697) | (698) |
| SCT-Ga146 | GYSITNGNHW | ITSSGRT | TREGGWLPPV | QSLLDSDGKTY | LVS | WQGTHFPYT |
| | (693) | (694) | (733) | (696) | (697) | (698) |
| SCT-Ga147 | GYSITNGNHW | ITSSGRT | TREGGWLPPV | QSLLDGDGKTY | LVS | WQGTHFPYT |
| | (693) | (694) | (733) | (845) | (697) | (698) |
| SCT-Ga148 | GYSITNGNHW | IRSSGST | TREGGWLPPV | QSLLDRDGKTY | LVS | WQGTHFPYT |
| | (693) | (718) | (733) | (759) | (697) | (698) |
| SCT-Ga149 | GYSITNGNHW | ITSSGRI | AREGGWLPPV | QSLLDSDGKTY | LVS | WQGTHFPYT |
| | (693) | (734) | (695) | (696) | (697) | (698) |
| SCT-Ga150 | GYSITNGNHW | ISSSGRT | AREGGWLPPV | QSLLDSDGKTY | LVS | WQGTHFPYT |
| | (693) | (726) | (695) | (696) | (697) | (698) |
| SCT-Ga151 | GYSITNGNHW | IRSSGGT | SREGGWLPPV | QSLLDSDGKTY | LVS | WQGTHFPYT |
| | (693) | (846) | (705) | (696) | (697) | (698) |
| SCT-Ga152 | GYSITNGNHW | ITSSGRT | AREGGWLPPV | QSLLDSDGKTY | LVS | WQGTHFPYT |
| | (693) | (694) | (695) | (696) | (697) | (698) |
| SCT-Ga153 | GYSITNGNHW | IRSSGST | TREGGWLPPV | QSLLDSDGKTY | LVS | WQGTHFPYT |
| | (693) | (718) | (733) | (696) | (697) | (698) |
| SCT-Ga154 | GYSITNGNHW | IRSSGST | TREGGWLPPV | QSLLDSDGKTY | LVS | WQGTHFPYT |
| | (693) | (718) | (733) | (696) | (697) | (698) |
| SCT-Ga155 | GYSITNGNHW | ITSSGRT | SREGGWLPPV | QSLLDSDGKTY | LVS | WQGTHFPYT |
| | (693) | (694) | (705) | (696) | (697) | (698) |
| SCT-Ga156 | GYSITNGHHW | ITSSGRT | AREGGWLPPV | QSLLDSDGKTY | LVS | WQGTHFPYT |
| | (753) | (694) | (695) | (696) | (697) | (698) |
| SCT-Ga157 | GYSITNGNHW | ITSSGRT | AREGGWLPPV | QSLLDSDGKTY | LVS | WQGTHFPYT |
| | (693) | (694) | (695) | (696) | (697) | (698) |
| SCT-Ga158 | GYSITNGNHW | ITSSGRT | AREGGWLPPV | QSLLDSDGKTY | LVS | WQGTHFPYT |
| | (693) | (694) | (695) | (696) | (697) | (698) |
| SCT-Ga159 | DYSITNGNHW | ISSSGRI | AREGGLLPPV | QSLLDGDGKTY | LVS | WQGTHFPYT |
| | (847) | (710) | (848) | (845) | (697) | (698) |
| SCT-Ga160 | GYSITNGNHW | ISSSGRI | AREGGWLPPV | QSLLDSDGKTY | LVS | WQGTHFPYT |
| | (693) | (710) | (695) | (696) | (697) | (698) |
| SCT-Ga161 | GYSITNGNHW | ITSSGRT | TREGGWFPPV | QSLLDSDGKTY | LVS | WQGTHFPYT |
| | (693) | (694) | (849) | (696) | (697) | (698) |
| SCT-Ga162 | GYSITNGNHW | ITSSGRT | TREGGWLPPV | QSLLDSDGKTY | LVS | WQGTHFPYT |
| | (693) | (694) | (733) | (696) | (697) | (698) |
| SCT-Ga163 | GYSITNGNHW | ITSSGRT | AREGGWLPPV | QSLLDSDGKTY | LVS | WQGTHFPYT |
| | (693) | (694) | (695) | (696) | (697) | (698) |
| SCT-Ga164 | GYSITNGNHW | IRSSGST | TREGGWLPPV | QSLLDSDGKTY | LVS | WQGTHFPYT |
| | (693) | (718) | (733) | (696) | (697) | (698) |
| SCT-Ga165 | GYSITNGNHW | IRSSGST | AREGGWLPPV | QSLLDSDGKTY | LVS | WQGTHFPYT |
| | (693) | (718) | (695) | (696) | (697) | (698) |
| SCT-Ga166 | GYSITNGNHW | ITSSGRT | AREGGWLPPV | QSLLDSDGKTY | LVS | WQGTHFPYT |
| | (693) | (694) | (695) | (696) | (697) | (698) |
| SCT-Ga167 | GYTFTTYG | INTYSGVP | ARYDYDVGFAY | QSLVHSNGNTY | KVS | SQSTHVPT |
| | (738) | (739) | (740) | (741) | (745) | (746) |
| SCT-Ga168 | GYSITNGNHW | IRSSGST | AREGGWLPPV | QSLLDSDGKTY | LVS | WQGTHFPYT |
| | (693) | (718) | (695) | (696) | (697) | (698) |
| SCT-Ga169 | GYSITNGNHW | IRSSGST | AREGGWLPPV | QSLLDSDGKTY | LVS | WQGTHFPYT |
| | (693) | (718) | (695) | (696) | (697) | (698) |
| SCT-Ga170 | GYSITNGNHW | IRSSGST | TREGGWLPPV | QSLLDSDGKTY | LVS | WQGTHFPYT |
| | (693) | (718) | (733) | (696) | (697) | (698) |
| SCT-Ga171 | GYSITNGNHW | ITSSGRT | AREGGWLPPV | QSLLDSDGKTY | LVS | WQGTHFPYT |
| | (693) | (694) | (695) | (696) | (697) | (698) |
| SCT-Ga172 | GYSITNGNHW | ISSSGRT | AREGGWLPPV | QSLLDSDGKTY | LVS | WQGTHFPYT |
| | (693) | (726) | (695) | (696) | (697) | (698) |
| SCT-Ga173 | GYSITNGNHW | ISSSGRT | AREGGWLPPV | QSLLDSDGKTY | LVS | WQGTHFPYT |
| | (693) | (726) | (695) | (696) | (697) | (698) |
| SCT-Ga174 | GYSITNGNHW | ISSSGRT | AREGGWLPPV | QSLLDSDGKTY | LVS | WQGTHFPYT |
| | (693) | (726) | (695) | (696) | (697) | (698) |
| SCT-Ga175 | GYSFTGYI | IVPYTGGT | ARQLRGYFAMDY | QSLANSYGNTY | GIS | LQGTHQPWT |
| | (850) | (851) | (852) | (853) | (854) | (855) |
| SCT-Ga176 | GFSLTRHG | IWPGGNT | ARSGGYGNFAPYYFDQ | QEISGY | AAS | LQYASYPRT |
| | (856) | (857) | (858) | (859) | (860) | (861) |
| SCT-Ga177 | GYTFTNYG | INTYTGES | ARDSFAY | KNLLHSNGITY | RMS | GQLLELPYT |
| | (862) | (863) | (864) | (865) | (866) | (867) |
| SCT-Ga178 | GYSFTDYN | IDVYYSGT | ARSLLRWYFDV | SSVSSSY | DTS | QQWSSYPLT |
| | (868) | (869) | (870) | (871) | (872) | (843) |
| SCT-Ga179 | GFSLSTSGIG | IWWDDDN | AQSGGITLMDY | QSIVHSDGNTY | KVS | FQSSHVPGT |
| | (873) | (874) | (875) | (876) | (745) | (877) |
| SCT-Ga180 | GYSFTGYT | IVPSNGGT | ARSLRFSFDY | QSLANSYGTTY | GIS | LQGTHQPPT |
| | (878) | (879) | (880) | (881) | (854) | (882) |
| SCT-Ga181 | GYTFTDYS | INTETGVP | ARTDYGNPYWYFDV | SSVSD | ATS | QQWSFNPQT |
| | (883) | (884) | (885) | (886) | (800) | (887) |
| SCT-Ga182 | GYSFTGYT | IIPYNGGT | ARGFRGYFAVDY | QSLTNSYGDTY | GIS | LQGTHQPWT |
| | (878) | (888) | (889) | (890) | (854) | (855) |
| SCT-Ga183 | GYTFTSYW | IDPTNDYS | ARSRGKDWYFDV | QDIGSS | ATS | LQCATSWT |
| | (772) | (891) | (892) | (799) | (800) | (893) |
| SCT-Ga184 | GYTFTSFN | FFPGNGAT | AREGWLSLGY | QNVYTN | SAS | QQHNRYPYT |
| | (894) | (895) | (896) | (897) | (751) | (898) |
| SCT-Ga185 | GYTFSNYW | IFPGGGSA | ARQKYGNYYYFDY | QDISNY | YTS | QQYSKLPYT |
| | (899) | (900) | (901) | (766) | (731) | (902) |
| SCT-Ga186 | GYSFTGYT | FIPYNGGT | ARGLRGFFSMDY | QSLANSYGNTY | GIS | LQGTHQPWT |
| | (878) | (903) | (904) | (853) | (854) | (855) |
| SCT-Ga187 | GYSFTGYT | IIPYNGGT | ARGFRGYFAVDY | QSLTNSYGNTY | GIS | LQGTHQPWT |
| | (878) | (888) | (889) | (905) | (854) | (855) |
| SCT-Ga188 | GFSLTSYG | IWSDGST | ARQIYYDYGWFAY | QNLTNSYGNTY | GIS | LQGTHQPWT |
| | (906) | (907) | (908) | (909) | (854) | (855) |
| SCT-Ga189 | GYSFTDYI | IIPYNGGT | ARGLRGYYAMDY | QSLANSYGSTF | GIS | LQGTHQPWT |
| | (910) | (888) | (911) | (912) | (854) | (855) |
| SCT-Ga190 | GYTFSNYW | ILPGSGSA | ARQKYGNYYYFDY | QGISNY | YTS | QHYSKLPYT |
| | (899) | (913) | (901) | (914) | (731) | (915) |
| SCT-Ga191 | GYTFTDYS | INTETGEP | TRTDYGNPYWYFDV | SSVNY | ATS | QQWSFNPQT |
| | (883) | (916) | (917) | (918) | (800) | (887) |
| SCT-Ga192 | GYSFTGYT | IIPYNGGT | ARGFRGYFAVDY | QSLTNSYGDTY | GIS | LQGTHQPWT |
| | (878) | (888) | (889) | (890) | (854) | (855) |
| SCT-Ga193 | GYSFTGYT | ISPYNGGT | ARSLRFSFDY | QSLANSYGNTY | GIS | LQGTHQPPT |
| | (878) | (919) | (880) | (853) | (854) | (882) |
| SCT-Ga194 | GYSFTGYT | INPYNGGT | ARRNYGYYFDY | QSLANSYGNTY | GIS | LQGTHQPLT |
| | (878) | (707) | (920) | (853) | (854) | (921) |
| SCT-Ga195 | GFDFSRYD | ISSGGSYT | ARQDYRYPYIMDY | QNINVW | KAS | QQGQSYPWT |
| | (922) | (814) | (923) | (790) | (791) | (924) |
| SCT-Ga196 | GFSLSTYGIG | IWWNDNK | ARIGSGKFYFDY | SSVSY | LTS | QQWSSNPPT |
| | (925) | (926) | (927) | (928) | (929) | (930) |
| SCT-Ga197 | GFSLTRHG | IWPGGNT | ARSGGYGNFAPYYFDQ | QSVLYSSNQKNF | WAS | HQYLSSYT |
| | (856) | (857) | (858) | (931) | (724) | (725) |
| SCT-Ga198 | GYTFTNYW | IDPSDSFP | TRGPRGYGDY | QDIKNY | YAT | LHHGESPPT |
| | (932) | (933) | (934) | (935) | (936) | (937) |
| SCT-Ga199 | GYTFTSYW | IFPGSGTS | AREGLYAFDY | QNIRNS | YAS | LQSNSWPYT |
| | (772) | (938) | (939) | (940) | (941) | (942) |
| SCT-Ga200 | GYTFTSYN | IFPGNGFT | TREGWLSLGY | SSVNSTY | RSS | HQWSGYPFT |
| | (943) | (944) | (945) | (946) | (947) | (948) |
| SCT-Ga201 | GYAFTGYY | ITCYNGAT | ARSNYRPWYFDV | QDVSTD | SAS | QQHYSTPYT |
| | (949) | (950) | (951) | (952) | (751) | (758) |
| SCT-Ga202 | GYTFSNYW | IFPGGGSA | ARQKYGNYYYFDY | QDISNY | YTS | QQYSKLPYT |
| | (899) | (900) | (901) | (766) | (731) | (902) |
| SCT-Ga203 | GYTFTSFW | IFPGGGDP | AREGLYAFDY | QSVRNN | YAS | QQSNSWPYT |
| | (953) | (954) | (939) | (955) | (941) | (956) |
| SCT-Ga204 | GYTFSNYW | IFPGSDSS | ARQKYGNFYYFDY | QDISNY | YTS | QQYSKLPYT |
| | (899) | (957) | (958) | (766) | (731) | (902) |
| SCT-Ga205 | GFSLTRHG | IWPGGST | ARSGGYGNFAPYYFDQ | QSVLYSSNQKNY | WAS | HQYLSSYT |
| | (856) | (959) | (858) | (723) | (724) | (725) |
| SCT-Ga206 | GYTFTSYN | IFPGNGFT | TREGWLSLGY | QNVGTN | SAS | QQHNSYPYT |
| | (943) | (944) | (945) | (960) | (751) | (961) |
| SCT-Ga207 | GYTFTSYW | IFPGSGTT | AREGLYAFDY | QSLLNSRTRKNS | WAS | KQSFNLYT |
| | (772) | (962) | (939) | (963) | (724) | (964) |
| SCT-Ga208 | GYTFTSYW | IFPGSGTN | AREGLYAFDY | QSIRNS | YAS | QQSYSWPYT |
| | (772) | (965) | (939) | (966) | (941) | (967) |
| SCT-Ga209 | GYSFTGYT | IFPYNSAT | ARGLRGFFALDY | QSLANSYGNTY | GIS | LQGTHQPWT |
| | (878) | (968) | (969) | (853) | (854) | (855) |
| SCT-Ga210 | GYTFTSYW | IFPGSGTS | AREGLYAFDY | QNIRNS | YAS | LQSNSWPYT |
| | (772) | (938) | (939) | (940) | (941) | (942) |
| SCT-Ga211 | GFSLTRHG | IWPGGNT | ASSGGYGNFAPYYFDQ | QSVLYSSNQKNF | WAS | HQYLSSYT |
| | (856) | (857) | (970) | (931) | (724) | (725) |
| SCT-Ga212 | GFAFSTYD | ISSGGSYT | ARQDYRYPYIMDY | QSISDY | YAS | QDGNTFPPT |
| | (971) | (814) | (923) | (972) | (941) | (973) |
| SCT-Ga213 | GYSFTDYN | IDVYYSGT | ARSSLRWYFDL | SSVSSSY | DTS | QQWSSYPLT |
| | (868) | (869) | (974) | (871) | (872) | (843) |
| SCT-Ga214 | GYTFSNYW | ILPVSGSA | ARQKYGNYYYFDY | QGISNY | YTS | QHYSKLPYT |
| | (899) | (975) | (901) | (914) | (731) | (915) |
| SCT-Ga215 | GYTFSSHN | IFPGNGFT | TREGWLSLGY | QNVVTN | SAS | QQHNSYPYT |
| | (976) | (944) | (945) | (977) | (751) | (961) |
| SCT-Ga216 | GYSFTDYT | IFPYNGAT | ARGLRGFFALDY | QSLANSYGNTY | GIS | LQGTHQPWT |
| | (978) | (979) | (969) | (853) | (854) | (855) |
| SCT-Ga217 | GYSFTGYI | IVPNNGGT | ARSLRFSFDY | QSLANSYGTTY | GIS | LQNTHQPPT |
| | (850) | (980) | (880) | (881) | (854) | (981) |
| SCT-Ga218 | GFSLSTSGIG | IWWDDDT | AQSGGITLMDY | QSIVYSNGNTY | KVS | FQGSHVPFT |
| | (873) | (982) | (875) | (983) | (745) | (984) |
| SCT-Ga219 | GYSFTGYT | IVPYNGGT | ARSLRFSFDY | QSLANSYGTTY | GIS | LQGTHQPPT |
| | (878) | (985) | (880) | (881) | (854) | (882) |
| SCT-Ga220 | GFTFTDYY | IRNKAKGYTT | ARDGGY | DHINNW | GAT | QQYWSTPFT |
| | (986) | (987) | (988) | (989) | (715) | (990) |
| SCT-Ga221 | GFSLSTSGMG | IWWDDVK | ARIAVGQAWFAY | QSVLYSSNQKNY | WAS | HQYLSSLT |
| | (991) | (992) | (993) | (723) | (724) | (816) |
| SCT-Ga222 | GYSFTGYT | IFPYNGGT | ARSLRFSFDY | QSLANSYGTTY | GIS | LQGTHQPPT |
| | (878) | (994) | (880) | (881) | (854) | (882) |
| SCT-Ga223 | GYSFTGYI | IVPNNGGT | ARSLRFSFDY | QSLANSYGTTY | GIS | LQGTHQPPT |
| | (850) | (980) | (880) | (881) | (854) | (882) |
| SCT-Ga224 | GYIFTNYW | IYPGGGYT | ARSRQLASYAMDY | ENIYSY | NAK | QHHYGTPPT |
| | (995) | (996) | (997) | (998) | (776) | (999) |
| SCT-Ga225 | GYSFTGYT | IFPYNSAT | ARGLRGFFALDY | QSLANSYGNTY | GIS | LQGTHQPWT |
| | (878) | (968) | (969) | (853) | (854) | (855) |
| SCT-Ga226 | GFPFNDYY | IRNKANGYTT | ARDGGY | DHINNW | GAT | QQYWSIPFT |
| | (1000) | (1001) | (988) | (989) | (715) | (1002) |
| SCT-Ga227 | GYTFTSYN | IYPGNGYT | AREGGWAMDY | SSVSY | ATS | QQWNSNPPT |
| | (943) | (1003) | (1004) | (928) | (800) | (1005) |
| SCT-Ga228 | GYSFTGYT | INPYNGGT | ARRNYGYYFDY | QSLANSYGDTF | GIS | LQGTHQPLT |
| | (878) | (707) | (920) | (1006) | (854) | (921) |
| SCT-Ga229 | GFSLSTSGIG | IWWDDDN | AQSGGITLMDY | QSIVHSDGNTY | KVS | FQSSHVPGT |
| | (873) | (874) | (875) | (876) | (745) | (877) |
| SCT-Ga230 | GFTFTDYY | IRNKAHGYTT | ARDGGY | DHINNW | GAT | QQYWSTPFT |
| | (986) | (1007) | (988) | (989) | (715) | (990) |
| SCT-Ga231 | DYSFTSYW | IYPGNSAA | SREGGYGLDY | QSIYNN | YAS | QQSNSWPYT |
| | (1008) | (1009) | (1010) | (1011) | (941) | (956) |
| SCT-Ga232 | GYSFTDYN | IDVYYSGT | ARSSLRWYFDL | SSVSSSN | DTS | QQWSSYPLT |
| | (868) | (869) | (974) | (1012) | (872) | (843) |
| SCT-Ga233 | GFSLTRHG | IWPGGNT | ARSGGYGNFAPYYFDQ | QNILYSSNQKNY | WAS | HQYLSSYT |
| | (856) | (857) | (858) | (1013) | (724) | (725) |
| SCT-Ga234 | GYTFSNYW | ILPVSGSS | ARQKYGNYYYFDY | QGISNY | YTS | QHYSKLPYT |
| | (899) | (1014) | (901) | (914) | (731) | (915) |
| SCT-Ga235 | GYTFSNYW | ILPGSGSS | ARQKYGNYYYFDF | QGLSNY | YTS | QQYSKLPYT |
| | (899) | (1015) | (1016) | (1017) | (731) | (902) |
| SCT-Ga236 | GYTFTSYW | IFPGSGTT | AREGLYAFDY | QSIRNS | YAS | QQSNSWPYT |
| | (772) | (962) | (939) | (966) | (941) | (956) |
| SCT-Ga237 | GFTFSTYA | ISSGGTYT | ARHFISTIITHFDY | QSVLYSSNQMNY | WAS | HQYLSSLT |
| | (1018) | (1019) | (1020) | (1021) | (724) | (816) |
| SCT-Ga238 | GYSITSYW | VYPGNSNT | TREGGYGMDY | QTISNN | YSS | QQSYSWPYT |
| | (1022) | (1023) | (1024) | (1025) | (1026) | (967) |
| SCT-Ga239 | GYTFTSYN | IFPGNGFT | TREGWLSLGY | QNVVTN | SAS | QQHNSYPYT |
| | (943) | (944) | (945) | (977) | (751) | (961) |
| SCT-Ga240 | GYTFTSYW | IFPGSGTT | AREGLYAFDY | QNIRNS | YAS | QQSNSWPYT |
| | (772) | (962) | (939) | (940) | (941) | (956) |
| SCT-Ga241 | GYTFTDYS | INTETGEP | TRTNYGNPYWYFDV | SSVNY | ATS | QQWNFNPQT |
| | (883) | (916) | (1027) | (918) | (800) | (1028) |
| SCT-Ga242 | GFTFNDYY | IRNKANGYTT | ARDGGY | DHINNW | GAT | QQYWSIPFT |
| | (1029) | (1001) | (988) | (989) | (715) | (1002) |
| SCT-Ga243 | GYSFIDYI | IIPYNGGT | ARGLRGYYAMDY | QSLTNSYGSTF | GIS | LQGTHQPWT |
| | (1030) | (888) | (911) | (1031) | (854) | (855) |
| SCT-Ga244 | GYTFTSYW | IFPGTGSA | TREGLYPFDY | QNIRNN | YAS | QQSNSWPYT |
| | (772) | (1032) | (1033) | (1034) | (941) | (956) |
| SCT-Ga245 | GFSLTSYG | IWSGGST | AREVRRYFDV | SSVISSY | STS | HQYHRSPLT |
| | (906) | (1035) | (1036) | (1037) | (1038) | (1039) |
| SCT-Ga246 | GFSLSTSGIG | IWWDDDN | AQSGGITLMDY | QSIVHSDGNTY | KVS | FQGSHVPGT |
| | (873) | (874) | (875) | (876) | (745) | (1040) |
| SCT-Ga247 | GYSFTGYT | IIPYNGGS | ARGLRGYFAMDY | QNLTNSYGNTY | GIS | LQGTHQPWT |
| | (878) | (1041) | (1042) | (909) | (854) | (855) |
| SCT-Ga248 | GYTFTSYN | IYPGNGYT | AREGGWAMDY | SSVNY | DTS | QQWNSNPPT |
| | (943) | (1003) | (1004) | (918) | (872) | (1005) |
| SCT-Ga249 | GYTFSNYW | ILPGSGSS | ARQKYGNFYYFDF | QGIGNY | YTS | HQYSKLPYT |
| | (899) | (1015) | (1043) | (1044) | (731) | (1045) |
| SCT-Ga250 | GYTFTNYG | ISTYIGEP | ARDSFAH | KNLLHSNGITY | RVS | GQLLELPYT |
| | (862) | (1046) | (1047) | (865) | (1048) | (867) |
| SCT-Ga251 | GYTFTSYN | IYPGNGYT | AREGGWAMDY | SSVSS | DTS | QQWSSNPST |
| | (943) | (1003) | (1004) | (1049) | (872) | (1050) |
| SCT-Ga252 | GYTFTSFW | IYPGSGTT | TREGLYAFDQ | QSIRSS | YAS | QQSNTWPYT |
| | (953) | (1051) | (1052) | (1053) | (941) | (1054) |
| SCT-Ga253 | GYTFTSYW | IFPGSGTT | AREGLYAFDY | QSIRNS | YAS | QQSNSWPYT |
| | (772) | (962) | (939) | (966) | (941) | (956) |
| SCT-Ga254 | GYTFTIHW | IYPGGGYT | ARDYGYDVYAMDY | QSLLDSDGKTY | LVS | WQGTHFPRT |
| | (1055) | (996) | (1056) | (696) | (697) | (1057) |
| SCT-Ga255 | GFAFSSFD | ISSGGSYT | TRQDYRYPYIMDY | QNINVW | KAS | QQGQSYPWT |
| | (1058) | (814) | (1059) | (790) | (791) | (924) |
| SCT-Ga256 | GYIFTNFW | IYPGGGYT | ARSRQLASYAMDY | ENIYSY | NAK | QHHYGTPPT |
| | (1060) | (996) | (997) | (998) | (776) | (999) |
| SCT-Ga257 | GFSLSTSGIG | IWWDDDT | AQSGGITLMDY | QNIVHSNGNTY | KVS | FQTSHVPGT |
| | (873) | (982) | (875) | (1061) | (745) | (1062) |
| SCT-Ga258 | GFTFTDYY | IRNKAHGYTT | ARDGGY | DHINNW | GAT | QQYWSTPFT |
| | (986) | (1007) | (988) | (989) | (715) | (990) |
| SCT-Ga259 | GFTFNDYY | IRNKANGYTT | ARDGGY | DHINNW | GAT | QQYWSIPFT |
| | (1029) | (1001) | (988) | (989) | (715) | (1002) |
| SCT-Ga260 | GFTFNDYY | IRDKANGYTT | ARDGGY | DHINNW | GAT | QQYWSIPFT |
| | (1029) | (1063) | (988) | (989) | (715) | (1002) |
| SCT-Ga261 | GYSFSDYN | IDVYYLST | ARSLLRWYFDV | SSVTY | DTS | QHWSSYPLT |
| | (1064) | (1065) | (870) | (1066) | (872) | (1067) |
| SCT-Ga262 | GYSFTGYT | IIPYNGGT | ARSLRFSFDY | QSLANSYGNTY | GIS | LQGTHQPPT |
| | (878) | (888) | (880) | (853) | (854) | (882) |
| SCT-Ga263 | GYTFTSYW | IFPGSGTT | TREGLYSFDY | QSIRNN | YVS | QQSISWPYT |
| | (772) | (962) | (1068) | (1069) | (1070) | (1071) |
| SCT-Ga264 | GYTFTSYW | IFPGSGIT | AREGLYAFDY | QSIRNS | YAS | QQTNSWPYT |
| | (772) | (1072) | (939) | (966) | (941) | (1073) |
| SCT-Ga265 | GYTFTSYN | IFPGNGFT | TREGWLSLGY | QNVVTN | SAS | QQHNSYPYT |
| | (943) | (944) | (945) | (977) | (751) | (961) |
| SCT-Ga266 | GYSFTGYT | IVPYNGGT | ARSLRFSFDY | QSLANSYGTTY | GIS | LQGTHQPPT |
| | (878) | (985) | (880) | (881) | (854) | (882) |
| SCT-Ga267 | GYSFTGYT | IVPNNGGT | ARSLRFSFDY | QSLANSYGTTY | GIS | LQGTHQPPT |
| | (878) | (980) | (880) | (881) | (854) | (882) |
| SCT-Ga268 | GYIFTNYG | INSYTGES | ARDSFAY | KNLLHSNGITY | RMS | GQLLELPYT |
| | (1074) | (1075) | (864) | (865) | (866) | (867) |
| SCT-Ga269 | GYTFTSYN | IFPGNGFT | TREGWLSLGY | QNVVTN | SAS | QQHNSYPYT |
| | (943) | (944) | (945) | (977) | (751) | (961) |
| SCT-Ga270 | GYTFTTFW | IFPGRGIT | SRGLGYFDV | QSIGTS | YGS | QQSYRWPYT |
| | (1076) | (1077) | (1078) | (1079) | (1080) | (1081) |
| SCT-Ga271 | GFTFNDYY | IRDKANGYTT | ARDGGY | DHINNW | GAT | QQYWSIPFT |
| | (1029) | (1063) | (988) | (989) | (715) | (1002) |
| SCT-Ga272 | GYTFTSYW | IFPGTGST | TREGLYPFDY | QNIRNN | YAS | QQSNSWPYT |
| | (772) | (1082) | (1033) | (1034) | (941) | (956) |
| SCT-Ga273 | GYSFTGYT | IIPYNGGT | ARGFRGYFAVDY | QSLTNSYGNTF | GIS | LQGTHQPWT |
| | (878) | (888) | (889) | (1083) | (854) | (855) |
| SCT-Ga274 | GYSFTDYN | IDVYYSGT | ARSLLRWYFDV | SSVSSSY | DTS | QQWSSYPLT |
| | (868) | (869) | (870) | (871) | (872) | (843) |
| SCT-Ga275 | GFTFSTYA | ISSGGSYT | ARHFISTIITHFDY | QSVLYSSNQMNY | WAS | HQYLSSLT |
| | (1018) | (814) | (1020) | (1021) | (724) | (816) |
| SCT-Ga276 | GFTFNDYY | IRNKANGYTT | ARDGGY | DHINNW | GAT | QQYWSIPFT |
| | (1029) | (1001) | (988) | (989) | (715) | (1002) |
| SCT-Ga277 | GYTFTSYY | IYPGDGST | TRDGNYGDWFPY | QNIVHSNGNTY | KVS | FQGSHVPYT |
| | (1084) | (1085) | (1086) | (1061) | (745) | (1087) |
| SCT-Ga278 | GYTFSNYW | ILPVSDSA | ARQKYGNYYYFDY | QGISSY | YTS | QHYSKLPYT |
| | (899) | (1088) | (901) | (1089) | (731) | (915) |
| SCT-Ga279 | GYTFTSYW | IFPGSGTS | AREGLYAFDY | ESVDKYGISF | AAS | QQSKEVPWT |
| | (772) | (938) | (939) | (1090) | (860) | (1091) |
| SCT-Ga280 | GYSFTGYT | IVPYNGGT | ARSVRFSFDY | QSLANSYGTTY | EIS | LQGTHQPPT |
| | (878) | (985) | (1092) | (881) | (1093) | (882) |
| SCT-Ga281 | GYTFTNYG | INTYTGES | ARDSFAY | KNLLHSNGITY | RMS | GQLLELPYT |
| | (862) | (863) | (864) | (865) | (866) | (867) |
| SCT-Ga282 | GYSFTGYY | VNPNNGGT | ASSPLLRLRGYAMDD | ESVDSYGKSF | VAS | QQNNEDPWT |
| | (1094) | (1095) | (1096) | (1097) | (1098) | (1099) |
| SCT-Ga283 | GYTFTSFW | IYPGRGIT | SRGLGYFDV | QSIGTS | YGS | QQSYRWPYT |
| | (953) | (1100) | (1078) | (1079) | (1080) | (1081) |
| SCT-Ga284 | GYTFTSYW | IFPGSGTT | SREGLYPFDY | QSIRNN | YAS | QQSNSWPYT |
| | (772) | (962) | (1101) | (1069) | (941) | (956) |
| SCT-Ga285 | GYTFTSYN | IFPGNGFT | TREGWLSLGY | QHVVTN | SAS | QQHNSYPYT |
| | (943) | (944) | (945) | (1102) | (751) | (961) |
| SCT-Ga286 | GFSLTSYD | IWTGGGT | VRSTMITHYAMDY | QNIGTS | YAF | QQSNSWPLT |
| | (1103) | (721) | (1104) | (1105) | (1106) | (1107) |
| SCT-Ga287 | GFTFNDYY | IRNKANGYTT | ARDGGY | DHINNW | GAT | QQYWSIPFT |
| | (1029) | (1001) | (988) | (989) | (715) | (1002) |
| SCT-Ga288 | GFSLSTSGIG | IWWDDDN | AQSGGITLMDY | DHINNW | GAT | QQYWSIPFT |
| | (873) | (874) | (875) | (989) | (715) | (1002) |
| SCT-Ga289 | GYTFTSYW | IYPGSGTT | TREGLYPFDY | QSIRNS | YVF | QQSNSWPYT |
| | (772) | (1051) | (1033) | (966) | (1108) | (956) |
| SCT-Ga290 | GYTFTSYN | IYPGNGYT | AREGGWAMDY | SSVSS | DTS | QQWSSNPST |
| | (943) | (1003) | (1004) | (1049) | (872) | (1050) |
| SCT-Ga291 | GYTFTSYW | IFPGSGIT | AREGLYAFDY | QSIRNS | YAS | QQTNSWPYT |
| | (772) | (1072) | (939) | (966) | (941) | (1073) |
| SCT-Ga292 | GFSFTDYN | VDIYYSGT | ARSSLRWYFDL | SSVSSSN | DTS | QQWSSYPLT |
| | (1109) | (1110) | (974) | (1012) | (872) | (843) |
| SCT-Ga293 | GYTFSNYW | IDPSDSYT | TRPSSYFFDY | QSIRNN | YAS | QQSYSWPYT |
| | (899) | (1111) | (1112) | (1069) | (941) | (967) |
| SCT-Ga294 | GYTFTSYN | IYPGNDGT | AREGWLSLDY | QNVVTN | SAS | QQYKSYPYT |
| | (943) | (1113) | (1114) | (977) | (751) | (1115) |
| SCT-Ga295 | GYSFTGNI | INPYNGGT | ARGFRGYFAMDY | QSLANSYGNTY | GIS | LQGTHQPWT |
| | (1116) | (707) | (1117) | (853) | (854) | (855) |
| SCT-Ga296 | GFSLSTSGIG | IWWDDDT | AQSGGITLMDY | QNIVHSNGNTY | KVS | FQTSHVPGT |
| | (873) | (982) | (875) | (1061) | (745) | (1062) |
| SCT-Ga297 | GYTFTDYN | IYPYNVGT | ARKNPLDY | KNLLHSNGITY | RVS | AQLLELPYT |
| | (1118) | (1119) | (1120) | (865) | (1048) | (1121) |
| SCT-Ga298 | GYTFSNCW | ILPGSGSA | ARQKYGNYYYFDY | QGISNY | YTS | QHYSKLPYT |
| | (1122) | (913) | (901) | (914) | (731) | (915) |
| SCT-Ga299 | GYSFTSYW | FYPGNSAT | SREGGYGMDH | QSIRNN | YSS | QQSNSWPYT |
| | (1123) | (1124) | (1125) | (1069) | (1026) | (956) |
| SCT-Ga300 | GYTFTSYY | IYPGDGST | TRDGNYGDWFPY | QSVSTSRYSY | YAS | QHSWEIPLT |
| | (1084) | (1085) | (1086) | (1126) | (941) | (1127) |
| SCT-Ga301 | GFAFSSFD | ISSGGSYT | ARQDYRYPYIMDY | QNINVW | KAS | QQGQSYPWT |
| | (1058) | (814) | (923) | (790) | (791) | (924) |
| SCT-Ga302 | GYSFTSYW | FYPGNSAT | SREGGYGMDH | QSIRNN | YAS | QQSNSWPYT |
| | (1123) | (1124) | (1125) | (1069) | (941) | (956) |
| SCT-Ga303 | GYSFTGYT | IIPYNGGT | ARSLRFSFDY | QSLANSYGNTY | GIS | LQGTHQPPT |
| | (878) | (888) | (880) | (853) | (854) | (882) |
| SCT-Ga304 | GYTFSNYN | IFPGNGVT | ARGGFGGALDY | SSVSH | DTS | QQWNNNPLT |
| | (1128) | (1129) | (1130) | (1131) | (872) | (1132) |
| SCT-Ga305 | GYSITSYW | VYPGNSNT | TREGGYGMDY | QTISNN | YSS | QQSYSWPYT |
| | (1022) | (1023) | (1024) | (1025) | (1026) | (967) |
| SCT-Ga306 | GYSFTGYT | IFPYNSAT | ARGLRGFFALDY | QSLANSYGNTY | GIS | LQGTHQPWT |
| | (878) | (968) | (969) | (853) | (854) | (855) |
| SCT-Ga307 | GYTFSNYN | IFPGNGVT | ARGGFGGAMDY | SSVSH | DTS | QQWNNNPLT |
| | (1128) | (1129) | (1133) | (1131) | (872) | (1132) |
| SCT-Ga308 | GFSLSTSGIG | IWWDDDN | AQSGGITLMDY | QSIVHSDGNTY | KVS | FQGSHVPGT |
| | (873) | (874) | (875) | (876) | (745) | (1040) |
| SCT-Ga309 | GFSLSTSGIG | IWWDDDN | AQSGGITLMDY | QSIVHSDGNTY | KVS | FQGSHVPGT |
| | (873) | (874) | (875) | (876) | (745) | (1040) |
| SCT-Ga310 | GYTFTNFG | INTYTGEP | ARDSFAH | KNLQHNNGITY | RVS | GQLLELPYT |
| | (1134) | (1135) | (1047) | (1136) | (1048) | (867) |
| SCT-Ga311 | GYTFTSYN | IYPGNGFT | AREGGWAMDY | SSVSH | DTS | QQWNSNPST |
| | (943) | (1137) | (1004) | (1131) | (872) | (1138) |
| SCT-Ga312 | GFPFNDYY | IRNKANGYTT | ARDGGY | DHIHNW | GAT | QQYWSIPFT |
| | (1000) | (1001) | (988) | (1139) | (715) | (1002) |
| SCT-Ga313 | GYSFTGYT | IIPYNGGT | ARSLRFSFDY | QSLANSYGNTY | GIS | LQGTHQPPT |
| | (878) | (888) | (880) | (853) | (854) | (882) |
| SCT-Ga314 | GYTFTSYW | IFPGSGTT | TREGLYAFDY | QSIRNS | YAS | QQSNSWPYT |
| | (772) | (962) | (1140) | (966) | (941) | (956) |
| SCT-Ga315 | GFTFTDYY | IRNKANGYTT | ARDGGY | DHINNW | GAT | QQYWSTPFT |
| | (986) | (1001) | (988) | (989) | (715) | (990) |
| SCT-Ga316 | GYTFTSYW | IYPGGGTT | TREGLYPFDY | QSIRNN | YVS | QQSNSWPYT |
| | (772) | (1141) | (1033) | (1069) | (1070) | (956) |
| SCT-Ga317 | GYSFTSYW | IYPGNSDT | TREGGYGMDY | QSIYNN | FSS | QQSNSWPYT |
| | (1123) | (1142) | (1024) | (1011) | (1143) | (956) |
| SCT-Ga318 | GYTFTSYW | IFPGSGTS | AREGLYAFDY | QNIRNS | YAS | LQSNSWPYT |
| | (772) | (938) | (939) | (940) | (941) | (942) |
| SCT-Ga319 | GYSFTGYT | INPSNGGT | TRRNYGYYFDY | QSLANSYGNTY | GIS | LQGTHQPLT |
| | (878) | (788) | (1144) | (853) | (854) | (921) |
| SCT-Ga320 | GFTFTDYY | IRNKANGYTT | ARDGGY | DHINNW | GAT | QQYWSIPFT |
| | (986) | (1001) | (988) | (989) | (715) | (1002) |
| SCT-Ga321 | GFSLSTSGIG | IWWDDDN | AQSGGITLMDY | QSIVHSDGNTY | KVS | FQGSHVPGT |
| | (873) | (874) | (875) | (876) | (745) | (1040) |
| SCT-Ga322 | GYTFTSYW | IFPGSGIT | AREGLYAFDY | QSIRNS | YAS | QQSNSWPYT |
| | (772) | (1072) | (939) | (966) | (941) | (956) |
| SCT-Ga323 | GFPFNDYY | IRNKAKGYTT | ARDGGY | DHINNW | GAT | QQYWSIPFT |
| | (1000) | (987) | (988) | (989) | (715) | (1002) |
| SCT-Ga324 | GFPFNDYY | IRNKANGYTT | ARDGGY | DHINNW | GAT | QQYWSIPFT |
| | (1000) | (1001) | (988) | (989) | (715) | (1002) |
| SCT-Ga325 | GYTFTSFW | IYPGRGIA | SRGLGYFDV | QNIGTS | SAS | QQSNRWPYT |
| | (953) | (1145) | (1078) | (1105) | (751) | (1146) |
| SCT-Ga326 | GYTFTSYN | IYPGNGYT | AREGGWAMDY | SSVSQ | DTS | QQWSSNPST |
| | (943) | (1003) | (1004) | (1147) | (872) | (1050) |
| SCT-Ga327 | GFSLSTSGIG | IWWDDDN | AQSGGITLMDY | QSIVHSDGNTY | KVS | FQASHVPGT |
| | (873) | (874) | (875) | (876) | (745) | (1148) |
| SCT-Ga328 | GYTFTNFW | IFPGGGYT | SRSTMLTGTY | RDIKSY | YAT | LHHGESPYT |
| | (1149) | (1150) | (1151) | (1152) | (936) | (1153) |
| SCT-Ga329 | GFTFNDYY | IRNKANGYTT | ARDGGY | DHINNW | GAT | QQYWSTPFT |
| | (1029) | (1001) | (988) | (989) | (715) | (990) |
| SCT-Ga330 | GYTFTNFW | IFPGGGHT | SRSTILTGAY | QDIKSY | YAT | LHHGESPYT |
| | (1149) | (1154) | (1155) | (1156) | (936) | (1153) |
| SCT-Ga331 | GFTFTDYY | IRNKANGYTT | ARDGGY | DHINNW | GAT | QQYWSTPFT |
| | (986) | (1001) | (988) | (989) | (715) | (990) |
| SCT-Ga332 | GFTFNDYY | IRNKANGYTT | ARDGGY | DHINNW | GAT | QQYWSIPFT |
| | (1029) | (1001) | (988) | (989) | (715) | (1002) |
| SCT-Ga333 | GYAFTNYL | INPGSGGN | ARRGDKYGSAWFAY | QDVSTA | SAS | QQHYSSPRT |
| | (687) | (1157) | (1158) | (757) | (751) | (752) |
| SCT-Ga334 | GFTFNDYY | IRDKANGYTT | ARDGGY | DHINNW | GAT | QQYWSIPFT |
| | (1029) | (1063) | (988) | (989) | (715) | (1002) |
| SCT-Ga335 | GYSFTDYN | IDVYYSGT | ARSSLRWYFDL | SSVNSTY | DTS | QQWSSYPLT |
| | (868) | (869) | (974) | (946) | (872) | (843) |
| SCT-Ga336 | GYSFTGYT | IVPYNGGT | ARSLRFSFDY | QSLANSYGTTY | GIS | LQGTHQPPT |
| | (878) | (985) | (880) | (881) | (854) | (882) |
| SCT-Ga337 | GYSFTDYN | IDVYYSST | ARSLLRWYFDV | SSVSSSY | DTS | QQWSSYPLT |
| | (868) | (1159) | (870) | (871) | (872) | (843) |
| SCT-Ga338 | GYTFTSYW | IYPGSGTT | TREGLYPFDY | QSIRNN | YAS | QQSNSWPYT |
| | (772) | (1051) | (1033) | (1069) | (941) | (956) |
| SCT-Ga339 | GYTFTDYN | INSNNGGA | ARGDYYGTTYDY | DHINNW | GAT | QQYWSIPFT |
| | (1118) | (1160) | (1161) | (989) | (715) | (1002) |
| SCT-Ga340 | GYSFTGYI | IHPYNGGT | ARLLRYAMDY | SSVSY | RTS | QQYHGYPPT |
| | (850) | (1162) | (1163) | (928) | (1164) | (1165) |
| SCT-Ga341 | GYTFISYW | IYPGDGDT | ARGTVGDY | QNVVTN | SAS | QQHNSYPYT |
| | (1166) | (1167) | (1168) | (977) | (751) | (961) |
| SCT-Ga342 | GYTFTNYG | INTYTGES | ARDSFAY | KNLLHSNGITY | RMS | GQLLELPYT |
| | (862) | (863) | (864) | (865) | (866) | (867) |
| SCT-Ga343 | GYSFTDYT | IIPYNGGT | ARGLRGYFAMDY | QSLANSYGVTY | GIS | LQGTHQPWT |
| | (978) | (888) | (1042) | (1169) | (854) | (855) |
| SCT-Ga344 | GYSFTGYT | IFPYNGGT | ARSVRFSFDY | QSLANSYGNTY | GIS | LQGTHQPPT |
| | (878) | (994) | (1092) | (853) | (854) | (882) |
| SCT-Ga345 | GFAFSRYD | ISSGGSYS | ARQDYRYPYIMDY | QNINVW | KTS | QQGQSYPWT |
| | (1170) | (1171) | (923) | (790) | (1172) | (924) |
| SCT-Ga346 | GYSFTGYT | INPYNGGT | ARFRLWQGMDY | QSLANSYGNTY | GIS | LQGTHQPPT |
| | (878) | (707) | (1173) | (853) | (854) | (882) |
| SCT-Ga347 | GYTFTSYW | IFPGSDTT | TREGLYAFDY | PNIRNS | YAS | QQSNSWPYT |
| | (772) | (1174) | (1140) | (1175) | (941) | (956) |
| SCT-Ga348 | GYTFTSYW | IFPGSGTT | AREGLYAFDY | QSIGTS | FAS | QQSNSWPYT |
| | (772) | (962) | (939) | (1079) | (1176) | (956) |
| SCT-Ga349 | GYTFTSYW | IFPHSGIT | AREGLYAFDY | QSIRNS | YVS | QQTNSWPYT |
| | (772) | (1177) | (939) | (966) | (1070) | (1073) |
| SCT-Ga350 | GFTFSTYA | ISSGGTYT | ARHFISTIITHFDY | QSVLYSSNQMNY | WAS | HQYLSSLT |
| | (1018) | (1019) | (1020) | (1021) | (724) | (816) |
| SCT-Ga351 | GYTFTSYN | IFPGNGFT | TREGWLSLGY | QNVVTN | SAS | QQHNSYPYT |
| | (943) | (944) | (945) | (977) | (751) | (961) |
| SCT-Ga352 | GYSFTSYW | IYPGNNAT | SREGGFGMDY | QSITNN | YAS | QQSNSWPYT |
| | (1123) | (1178) | (1179) | (1180) | (941) | (956) |
| SCT-Ga353 | GYSFTDYT | IFPYNGAT | ARGLRGFFALDY | QSLANSYGNTY | GIS | LQGTHQPWT |
| | (978) | (979) | (969) | (853) | (854) | (855) |
| SCT-Ga354 | GYSFTDYI | IIPYNGGT | ARGLRGYYTMDY | QSLANIYGNTY | GIS | LQGTHQPWT |
| | (910) | (888) | (1181) | (1182) | (854) | (855) |
| SCT-Ga355 | GYTFTTFW | IFPGRGIT | SRGLGYFDV | QSVGTS | YGF | QQSYRWPYT |
| | (1076) | (1077) | (1078) | (1183) | (1184) | (1081) |
| SCT-Ga356 | GYTFSNYW | ILPGSGSA | ARQKYGNYYYFDY | QGISNY | YTS | QHYSKLPYT |
| | (899) | (913) | (901) | (914) | (731) | (915) |
| SCT-Ga357 | GYTFTSYW | IYPGSGTT | TREGLYPFDY | QSIRNN | YVF | QQSNSWPYT |
| | (772) | (1051) | (1033) | (1069) | (1108) | (956) |
| SCT-Ga358 | GYSFTDYN | IDVYYSGT | ARSSLRWYFDL | SSVSSSD | DTS | QQWSSYPLT |
| | (868) | (869) | (974) | (1185) | (872) | (843) |
| SCT-Ga359 | GFSLSTSGIG | IWWDDDS | AQSGGITLMDY | QSIVHSNGNTY | KVS | FQGSHVPGT |
| | (873) | (1186) | (875) | (1187) | (745) | (1040) |
| SCT-Ga360 | GYSFTGYT | IFPYNGAT | ARGLRGYFAMDY | QSLANSYGNTY | GIS | LQGTHQPWT |
| | (878) | (979) | (1042) | (853) | (854) | (855) |
| SCT-Ga361 | GYTFTSYW | IFPGSGTT | TREGLYPFDY | QNIRNN | YAS | QQSNSWPYT |
| | (772) | (962) | (1033) | (1034) | (941) | (956) |
| SCT-Ga362 | GYTFTSYW | IFPGTGSA | TREGLSPFDY | QNIRNN | YAS | QQSNSWPYT |
| | (772) | (1032) | (1188) | (1034) | (941) | (956) |
| SCT-Ga363 | GYSFTDYN | IDVYYSGT | ARSSLRWYFDL | SSVSSRY | DTS | QQWSSYPLT |
| | (868) | (869) | (974) | (1189) | (872) | (843) |
| SCT-Ga364 | GYTFTSYS | IYPGNVIT | ARDGGFGTY | QNVHTN | SAS | QQYNSYPYT |
| | (1190) | (1191) | (1192) | (1193) | (751) | (1194) |
| SCT-Ga365 | GYTFTSYN | IYPGNGYT | AREGGWAMDY | SSVSY | ATS | QQWNSNPPT |
| | (943) | (1003) | (1004) | (928) | (800) | (1005) |
| SCT-Ga366 | GYSFTGYT | IFPYNGAT | TRGLRGYFALDY | QSLANSYGNTY | GIS | LQGTHLPWT |
| | (878) | (979) | (1195) | (853) | (854) | (1196) |
| SCT-Ga367 | GYSFTGYT | IFPYNSAT | ARGLRGFFALDY | QSLANSYGNTY | GIS | LQGTHQPWT |
| | (878) | (968) | (969) | (853) | (854) | (855) |
| SCT-Ga368 | GYTFTSYN | IYPGNGGT | ARDGFYPFDY | QNVGTN | SAS | QQYNSYPLT |
| | (943) | (1197) | (1198) | (960) | (751) | (1199) |
| SCT-Ga369 | GYTFTSYN | IYPGNGYT | AREGGWAMDY | SSVSS | DTS | QQWSSNPST |
| | (943) | (1003) | (1004) | (1049) | (872) | (1050) |
| SCT-Ga370 | GYTFTNYG | INTYTGES | ARDSFAH | KNLLHSNGITY | RMS | GQLLELPYT |
| | (862) | (863) | (1047) | (865) | (866) | (867) |
| SCT-Ga371 | GYSFTGYT | IFPYNSAT | ARGLRGFFALDY | QSLANSYGNTY | GIS | LQGIHQPWT |
| | (878) | (968) | (969) | (853) | (854) | (1200) |
| SCT-Ga372 | GYSITSYW | IYPGNSNT | TREGGYGMDY | QTISNN | YSS | QQSYSWPYT |
| | (1022) | (1201) | (1024) | (1025) | (1026) | (967) |
| SCT-Ga373 | GFAFSTYD | ISSGGSYT | ARQDYRYPYIMDY | QNINVW | KAS | QQGQSYPWT |
| | (971) | (814) | (923) | (790) | (791) | (924) |
| SCT-Ga374 | GYTFSNYW | ILPVSDSA | ARQKYGTYYYFDY | QGISNY | YTS | QHYSKLPYT |
| | (899) | (1088) | (1202) | (914) | (731) | (915) |
| SCT-Ga375 | GFSLSTSGIG | IWWDDDN | AQSGGITLMDY | QSIVHSDGNTY | KVS | FQGSHVPGT |
| | (873) | (874) | (875) | (876) | (745) | (1040) |
| SCT-Ga376 | GYTFTNFW | IFPGGDYT | SRSTIISGAY | QDIKSY | YAT | LHHGERPYT |
| | (1149) | (1203) | (1204) | (1156) | (936) | (1205) |
| SCT-Ga377 | GYTFTSYW | IYPGSGTT | TREGLYAFDY | PNIRNS | YAS | QQSNSWPYT |
| | (772) | (1051) | (1140) | (1175) | (941) | (956) |
| SCT-Ga378 | GYSFTGYI | INPYNGGT | TRLLRFAMDY | QSLANSYGSTY | GIS | LQGTHQPPT |
| | (850) | (707) | (1206) | (1207) | (854) | (882) |
| SCT-Ga379 | GFVFSSYD | ISSGGSYT | ARQDYRYPYTMDY | QNINVW | KAS | QQGQSYPWT |
| | (1208) | (814) | (1209) | (790) | (791) | (924) |
| SCT-Ga380 | GFPFNDYY | IRNKANGYTT | ARDGGY | DHINNW | GAT | QQYWSIPFT |
| | (1000) | (1001) | (988) | (989) | (715) | (1002) |
| SCT-Ga381 | GYSFTRYW | FYPGNSAT | SREGGYGMDH | QSIRNN | YVS | QQSNSWPYT |
| | (1210) | (1124) | (1125) | (1069) | (1070) | (956) |
| SCT-Ga382 | GYTFTDYA | IGTSNGNT | TRDYYGRSYLYFDY | SSVSSSY | STS | QQYSGYPLT |
| | (1211) | (1212) | (1213) | (871) | (1038) | (1214) |
| SCT-Ga383 | GYSFTGYT | IFPYNGGT | ARSRSFAMDY | QSLTNSYGDTY | GIS | LQGTHQPWT |
| | (878) | (994) | (1215) | (890) | (854) | (855) |
| SCT-Ga384 | GFTFSDYY | IRNKANGYTT | ARDGGY | DHINNW | GAT | QQYWSIPFT |
| | (1216) | (1001) | (988) | (989) | (715) | (1002) |
| SCT-Ga385 | GYTFTDHS | INTETGEP | ASPRNYDGAMDY | DHINNW | GAT | QQYWSTPLT |
| | (1217) | (916) | (1218) | (989) | (715) | (1219) |
| SCT-Ga386 | GFTFTSYY | IRDKANGYTT | ARDGGY | EHIYGA | GAT | QNVLSTPLT |
| | (1220) | (1063) | (988) | (1221) | (715) | (1222) |
| SCT-Ga387 | GYAFSSSW | IYPGDGDT | ASNYYYFDY | KSVSTSGYSY | LAS | QHSRELPWT |
| | (1223) | (1167) | (1224) | (1225) | (1226) | (1227) |
| SCT-Ga388 | GYTFTNYW | TNPSTGSS | AAYYRYGDGAY | DHINNW | GAS | QQYWSTPWT |
| | (932) | (1228) | (1229) | (989) | (691) | (716) |
| SCT-Ga389 | GFTFSTYV | ISSGGSYI | ARWLLGLYAMDY | QNINVW | KAS | QQGQSYPRT |
| | (1230) | (1231) | (1232) | (790) | (791) | (1233) |
| SCT-Ga390 | GFTFSDYY | IRNKANGYTT | ARDGGY | DHINNW | GAT | QQYWSTPFT |
| | (1216) | (1001) | (988) | (989) | (715) | (990) |
| SCT-Ga391 | GYAFSSYW | IYPGDGDS | ARRKDYGYDY | DHINNW | GAT | QQYWSTPFT |
| | (1234) | (1235) | (1236) | (989) | (715) | (990) |
| SCT-Ga392 | GFTFSEFY | SRNKANDYST | ARDAYGYPWFVY | QSLLYSGNQKNY | WAS | QQYYSYPWT |
| | (1237) | (1238) | (1239) | (1240) | (724) | (1241) |
| SCT-Ga393 | GFTFSNFG | ISSGSSTI | ARGRYDYLYAMDY | QDISNY | YTS | QQGNTLPFT |
| | (1242) | (1243) | (1244) | (766) | (731) | (767) |
| SCT-Ga394 | GFTFTDYY | ITNKANGYTT | ARDGGY | DHINNW | GAT | QQYWSIPFT |
| | (986) | (1245) | (988) | (989) | (715) | (1002) |
| SCT-Ga395 | GFTFSNFW | IRLNSDNYAT | HGNFYDLDY | QEISGF | AAS | LQYASYPPT |
| | (1246) | (1247) | (1248) | (1249) | (860) | (1250) |
| SCT-Ga396 | GFSFTAYT | IVPYNGGT | ARGLQRFFAMDF | QSLANSYGSTY | GIS | LQYTHQPPT |
| | (1251) | (985) | (1252) | (1207) | (854) | (1253) |
| SCT-Ga397 | GYSFTTYT | INPYNGGT | ARSRSFAMDY | QSLANSYGDTY | GIS | LQGTHQPWT |
| | (1254) | (707) | (1215) | (1255) | (854) | (855) |
| SCT-Ga398 | GYTFTNYW | TNPSTGSS | AAYYRYGDGAY | DHINNW | GAS | QQYWSTPWT |
| | (932) | (1228) | (1229) | (989) | (691) | (716) |
| SCT-Ga399 | GYSFTGYT | IIPYNGGT | ARGLRGYFAMDY | QSLTNSYGNTY | GIS | LQGTHQPWT |
| | (878) | (888) | (1042) | (905) | (854) | (855) |
| SCT-Ga400 | GYTFTDYN | IYPYNGGT | ARYYGYFDY | DHINNW | GAT | QQYWSTPLT |
| | (1118) | (1256) | (1257) | (989) | (715) | (1219) |
| SCT-Ga401 | GYSFTGYI | IVPYNGGT | ARGLQRFYAMDY | QSLANSYGNTY | GIS | LQGTHQPPT |
| | (850) | (985) | (1258) | (853) | (854) | (882) |
| SCT-Ga402 | GFTFTSYY | IRDKANGYTT | ARDGGY | DHINNW | GAT | QQYWSTPFT |
| | (1220) | (1063) | (988) | (989) | (715) | (990) |
| SCT-Ga403 | GFTFSNFW | IRLNSDNYAT | HGNFYTLDY | QEITGF | AAS | LQYASYPPT |
| | (1246) | (1247) | (1259) | (1260) | (860) | (1250) |
| SCT-Ga404 | GYTFTNYW | TNPSTGYS | AAYYRYGDGAY | DHINNW | GAT | QQYWSTPWT |
| | (932) | (1261) | (1229) | (989) | (715) | (716) |
| SCT-Ga405 | GFTFSSFG | ISSGSSTI | ARGRFDYLYAMDY | QDISNY | YTS | QQGNTLPFT |
| | (1262) | (1243) | (1263) | (766) | (731) | (767) |
| SCT-Ga406 | GYSFTGYT | INPYNGGT | ARGLRFSLEY | QSLANSYGNTY | GIS | LQGTHQPWT |
| | (878) | (707) | (1264) | (853) | (854) | (855) |
| SCT-Ga407 | GYSFTGYI | IIPYNGGT | ARGLSYRYDY | QSLANSYGNTY | EIS | LQGTHQPPT |
| | (850) | (888) | (1265) | (853) | (1093) | (882) |
| SCT-Ga408 | GYSFTGYT | IIPYNGGT | ARGLRGYFAMDY | QSLTNSYGNTY | GIS | LQGTHQPWT |
| | (878) | (888) | (1042) | (905) | (854) | (855) |
| SCT-Ga409 | GYSFTGYI | IYPYNGGT | ARLISYAMDY | QSLANSYGKTY | GIS | LQGTHQPPT |
| | (850) | (1256) | (1266) | (1267) | (854) | (882) |
| SCT-Ga410 | GYTFTDHS | INTETGEP | ASPRNYDGAMDY | DHINNW | GAT | QQYWSTPLT |
| | (1217) | (916) | (1218) | (989) | (715) | (1219) |
| SCT-Ga411 | GYTFTNYW | TNPSTGYS | AAYYRYGDGAY | DHINSW | GTT | QQYWSTPWT |
| | (932) | (1261) | (1229) | (1268) | (1269) | (716) |
| SCT-Ga412 | GYAFTDYL | INPGSGGA | ARYHYYGSGLFPY | QSLLNSGNQKNY | GAS | QNYHSYPFT |
| | (1270) | (1271) | (1272) | (1273) | (691) | (1274) |
| SCT-Ga413 | GYTFTSYV | INPYNDGT | AREIDY | DHINNW | GAS | QQYWSTPWT |
| | (1275) | (1276) | (1277) | (989) | (691) | (716) |
| SCT-Ga414 | GFTFSDYY | IRNKANCYTT | ARDGGY | DHINNW | GAT | QQYWSIPFT |
| | (1216) | (1278) | (988) | (989) | (715) | (1002) |
| SCT-Ga415 | GYTFTNYG | INTYTGEP | ARYEYFDY | TDIDDD | EGN | LQSDNMPYT |
| | (862) | (1135) | (1279) | (1280) | (1281) | (1282) |
| SCT-Ga416 | GYSITSDYA | ITYSGDT | ARRELGQGFTY | QDVSTT | SAS | QQHYSVPWT |
| | (1283) | (1284) | (1285) | (1286) | (751) | (1287) |
| SCT-Ga417 | GYTFTYYE | IDPETGGT | TRWGYKFAY | DHINNW | GAT | QQYWSTPFT |
| | (1288) | (1289) | (1290) | (989) | (715) | (990) |
| SCT-Ga418 | GYDFTDYL | INPGSGGT | ARYHYYGSNLFPY | QSLLNSGNQKNY | GAS | QNYHSYPFT |
| | (1291) | (1292) | (1293) | (1273) | (691) | (1274) |
| SCT-Ga419 | GYSFTTYT | INPYNGGT | ARSRTFAMDY | QSLANSYGNTY | GIS | LQGTHQPWT |
| | (1254) | (707) | (1294) | (853) | (854) | (855) |
| SCT-Ga420 | GFTFSSYT | ISGGGSYT | TRWLQSLYAMDY | QNINVW | KAS | QQGQSYPYT |
| | (804) | (1295) | (1296) | (790) | (791) | (803) |
| SCT-Ga421 | GYSFTGYT | INPYNGGT | ASGGLRYGFAY | QSLANSYGNTY | GIS | LQGTHQPLT |
| | (878) | (707) | (1297) | (853) | (854) | (921) |
| SCT-Ga422 | GFTFNTNA | IRSKSNNYAT | VGSTMTIFSY | SSVSSSY | TTS | QQYSGYPLT |
| | (1298) | (1299) | (1300) | (871) | (834) | (1214) |
| SCT-Ga423 | GFSLTSYG | IWADGST | ARDLGYLTTAWFAY | SSVSY | GIS | QQISSYPLT |
| | (906) | (1301) | (1302) | (928) | (854) | (1303) |
| SCT-Ga424 | GYSFTAYT | INPYNGGI | ARSRTFAMDY | QSLANSYGNTY | GIS | LQGTHQPWT |
| | (1304) | (1305) | (1294) | (853) | (854) | (855) |
| SCT-Ga425 | GYSFTDYI | IVPYNGGT | ARGLQRFYAMDY | QSLENSYGNTY | GIS | LQGTHQPPT |
| | (910) | (985) | (1258) | (1306) | (854) | (882) |
| SCT-Ga426 | GYTFTNYW | TNPSTGSS | AAYYRYGDGAY | DHINNW | GAS | QQYWSTPWT |
| | (932) | (1228) | (1229) | (989) | (691) | (716) |
| SCT-Ga427 | GFSFPGYT | INPYNGAT | TRGTLITGFAY | QSLANSYGNTY | GIS | LQGTHLPLT |
| | (1307) | (1308) | (1309) | (853) | (854) | (1310) |
| SCT-Ga428 | GFSFTGYT | INPYNGAT | ARGTLITGFAY | QSLANSYGNTY | GIS | LQGTHLPLT |
| | (1311) | (1308) | (1312) | (853) | (854) | (1310) |
| SCT-Ga429 | GYSFTGYI | INPYNGGT | ARSRSFAMDY | QSLANSYGNTF | GIS | LQGTHQPWT |
| | (850) | (707) | (1215) | (1313) | (854) | (855) |
| SCT-Ga430 | GYSFTGYT | IVPYNGGT | ARGLSFRYDY | QSLANSYGDTF | GIS | LQGTHQPPT |
| | (878) | (985) | (1314) | (1006) | (854) | (882) |
| SCT-Ga431 | GYSFTGYI | IFPYNGGT | ARGLPRFYAMDY | QSLANSYGNTY | GIS | LQGTHQPPT |
| | (850) | (994) | (1315) | (853) | (854) | (882) |
| SCT-Ga432 | GFSLTSYG | IWAGGTT | ARFPSYRESMDY | ENIYSN | AT | QHFWGTPYT |
| | (906) | (1316) | (1317) | (1318) | (1319) | (1320) |
| SCT-Ga433 | GFTFSSYT | ISSGGSYT | TRWLLSLYAMDY | QNINVW | KAS | QQGQTYPFT |
| | (804) | (814) | (1321) | (790) | (791) | (1322) |
| SCT-Ga434 | GYSFTGYI | IYPYNGGT | ARLISYAMDY | QSLANSYGKTY | GIS | LQGTHQPPT |
| | (850) | (1256) | (1266) | (1267) | (854) | (882) |
| SCT-Ga435 | GYSFTGYT | INPYNGAT | ARGLRFSLEY | QSLANSYGNTY | GIS | LQGTHQPWT |
| | (878) | (1308) | (1264) | (853) | (854) | (855) |
| SCT-Ga436 | GFNIKDTY | IDPANGNI | ARSLPGAY | SSVSY | GIS | QQRSSFPPT |
| | (1323) | (1324) | (1325) | (928) | (854) | (1326) |
| SCT-Ga437 | GFTFTNYY | IRNRPYGYTT | AAGLDY | QSLLDSDGKTY | LVS | WQGTHFPYT |
| | (1327) | (1328) | (1329) | (696) | (697) | (698) |
| SCT-Ga438 | GFTFSNFG | ISSGSSTI | ARGRYDYLYAMDY | QDISNY | YTS | QQGNTLPFT |
| | (1242) | (1243) | (1244) | (766) | (731) | (767) |
| SCT-Ga439 | GYAFSDYL | INPGSGGT | ARFHYYGSSLFPY | QSLLNSGNQKKY | GAS | QNYHRFPFT |
| | (1330) | (1292) | (1331) | (1332) | (691) | (1333) |
| SCT-Ga440 | GYSFTGYT | IVPYNGGT | ARGLQRFYAMDY | QSLANSYGNTY | GIS | LQGTHQPPT |
| | (878) | (985) | (1258) | (853) | (854) | (882) |
| SCT-Ga441 | GFTFTDYY | IRNKANGYTT | ARDGGY | DHINNW | GAT | QQYWSTPFT |
| | (986) | (1001) | (988) | (989) | (715) | (990) |
| SCT-Ga442 | GYIFTSYW | IYPGIGST | EVPIGTVDY | QTIGTW | AT | QQLYNTPLT |
| | (1334) | (1335) | (1336) | (1337) | (1319) | (1338) |
| SCT-Ga443 | GFSLSTSGMG | IWWDDVK | ARLGVYYRYDGDY | QSLLDSDGKTY | LVS | WQGTHFPQT |
| | (991) | (992) | (1339) | (696) | (697) | (1340) |
| SCT-Ga444 | GFTFIDYY | IRNKANGYTT | ARDGGY | DHINNW | GAT | QQYWSTPFT |
| | (1341) | (1001) | (988) | (989) | (715) | (990) |
| SCT-Ga445 | GFLITAYG | IWGDGST | ARYDYYGMDY | QEISGF | AAS | LQYASYPPT |
| | (1342) | (1343) | (1344) | (1249) | (860) | (1250) |
| SCT-Ga446 | GFTFTNYY | IRNKPYGYTT | AAGLDY | EDIYNR | GAT | QQYWSTPWT |
| | (1327) | (1345) | (1329) | (714) | (715) | (716) |
| SCT-Ga447 | GFTFSNYA | ISSGGIYT | ARQRTTATDYFDY | DHINNW | GAT | QQYWSTPFT |
| | (1346) | (1347) | (1348) | (989) | (715) | (990) |
| SCT-Ga448 | GYIFTSYW | IYPGTGGT | EVPIGTVDY | QTIGTW | AT | QQLYSTPLT |
| | (1334) | (1349) | (1336) | (1337) | (1319) | (1350) |
| SCT-Ga449 | GFTFTNYY | IRNKPYGYTT | AAGLDY | QSLLDSDGKTY | LVS | WQGTHFPYT |
| | (1327) | (1345) | (1329) | (696) | (697) | (698) |
| SCT-Ga450 | GYIFTSYW | IYPGTGST | EVPVGTFDY | QTIGTW | AT | QQLYSTPLT |
| | (1334) | (1351) | (1352) | (1337) | (1319) | (1350) |
| SCT-Ga451 | GYSITSDYA | ITYSGDT | ARREVGQGFTY | QDVSTT | SAS | QQHYSVPWT |
| | (1283) | (1284) | (1353) | (1286) | (751) | (1287) |
| SCT-Ga452 | GFSLTSFG | IWADGGT | ARDLGYLTTAWFAY | SSVRY | GIS | QQTSSYPLT |
| | (1354) | (1355) | (1302) | (1356) | (854) | (1357) |
| SCT-Ga453 | GYSFTGYI | IIPYNGGT | TRGLQRFYAMDY | QSLANSYGNTY | GIS | LQGTHQPPT |
| | (850) | (888) | (1358) | (853) | (854) | (882) |
| SCT-Ga454 | GYSITSDYA | IVYSGST | ARRQVGLGFAY | QDVSTA | SAS | QQHYSSPWT |
| | (1283) | (1359) | (1360) | (757) | (751) | (1361) |
| SCT-Ga455 | GYSFTGYT | IIPYTGGT | ARSRTFAMDY | QSLANSYGNTY | GIS | LQGTHQPWT |
| | (878) | (1362) | (1294) | (853) | (854) | (855) |
| SCT-Ga456 | GFTFSQFW | IRLKSNSYKT | TRLPIFDY | SSVSY | GIS | QQISSYPLT |
| | (1363) | (1364) | (1365) | (928) | (854) | (1303) |
| SCT-Ga457 | GFSLTRHG | IWPGGNT | ARSGGYGNFAPYYFDQ | QSVLYSSNQKNF | WAS | HQYLSSYT |
| | (856) | (857) | (858) | (931) | (724) | (725) |
| SCT-Ga458 | GFSLTRHG | IWPGGNT | ARSGGYGNFAPYYFDQ | QSVLYSSNQKNF | WAS | HQYLSSYT |
| | (856) | (857) | (858) | (931) | (724) | (725) |
| SCT-Ga459 | GFTFSSYT | ISSGGSYT | TRWLLSLYAMDY | QNINVW | KAS | QQGQTYPFT |
| | (804) | (814) | (1321) | (790) | (791) | (1322) |
| SCT-Ga460 | GFTFSSYT | ISSGGSYT | TRWLLSLYAMDY | QNINVW | KAS | QQGQTYPFT |
| | (804) | (814) | (1321) | (790) | (791) | (1322) |
| SCT-Ga461 | GFTFSSYT | ISSGGSYT | TRWLLSLYAMDY | QNINVW | KAS | QQGQTYPFT |
| | (804) | (814) | (1321) | (790) | (791) | (1322) |
| SCT-Ga462 | GFTFSSYT | ISSGGSYT | TRWLLSLYAMDY | QNINVW | KAS | QQGQTYPFT |
| | (804) | (814) | (1321) | (790) | (791) | (1322) |
| SCT-Ga463 | GFAFSSFD | ISSGGSYT | TRQDYRYPYIMDY | QNINVW | KAS | QQGQSYPWT |
| | (1058) | (814) | (1059) | (790) | (791) | (924) |
| SCT-Ga464 | GFAFSSFD | ISSGGSYT | TRQDYRYPYIMDY | QNINVW | KAS | QQGQSYPWT |
| | (1058) | (814) | (1059) | (790) | (791) | (924) |
| SCT-Ga465 | GFAFSSFD | ISSGGSYT | TRQDYRYPYIMDY | QNINVW | KAS | QQGQSYPWT |
| | (1058) | (814) | (1059) | (790) | (791) | (924) |
| SCT-Ga466 | GFAFSSFD | ISSGGSYT | TRQDYRYPYIMDY | QNINVW | KAS | QQGQSYPWT |
| | (1058) | (814) | (1059) | (790) | (791) | (924) |
| SCT-Ga467 | GYAFTDYL | INPGSGGT | ARYHYYGSGLFPY | QSLLNSGNQKNY | GAS | QNYHSYPFT |
| | (1270) | (1292) | (1272) | (1273) | (691) | (1274) |
| SCT-Ga468 | GYAFTDYL | INPGSGGT | ARYHYYGSGLFPY | QSLLNSGNQKNY | GAS | QNYHSYPFT |
| | (1270) | (1292) | (1272) | (1273) | (691) | (1274) |
| SCT-Ga469 | GYAFTDYL | INPGSGGT | ARYHYYGSGLFPY | QSLLNSGNQKNY | GAS | QNYHSYPFT |
| | (1270) | (1292) | (1272) | (1273) | (691) | (1274) |
| SCT-Ga470 | GYAFTDYL | INPGSGGT | ARYHYYGSGLFPY | QSLLNSGNQKNY | GAS | QNYHSYPFT |
| | (1270) | (1292) | (1272) | (1273) | (691) | (1274) |
| SCT-Ga471 | GYTFSNYW | ILPGSGSA | ARQKYGNFYYFDF | QGIGNY | YTS | HQYSKLPYT |
| | (899) | (913) | (1043) | (1044) | (731) | (1045) |
| SCT-Ga472 | GYTFSNYW | ILPGSGSA | ARQKYGNFYYFDF | QGIGNY | YTS | HQYSKLPYT |
| | (899) | (913) | (1043) | (1044) | (731) | (1045) |
| SCT-Ga473 | GYTFSNYW | ILPGSGSA | ARQKYGNFYYFDF | QGIGNY | YTS | HQYSKLPYT |
| | (899) | (913) | (1043) | (1044) | (731) | (1045) |
| SCT-Ga474 | GYTFSNYW | ILPGSGSA | ARQKYGNFYYFDF | QGIGNY | YTS | HQYSKLPYT |
| | (899) | (913) | (1043) | (1044) | (731) | (1045) |
| SCT-Ga475 | GYAFTNYL | INPGSGGT | ARTGVYGNFLIFDY | QSLLNSGIQKNY | GAS | QNDHRYPFT |
| | (687) | (1292) | (689) | (690) | (691) | (692) |
| SCT-Ga476 | GYAFTNYL | INPGSGGT | ARTGVYGNFLIFDY | QSLLNSGIQKNY | GAS | QNDHRYPFT |
| | (687) | (1292) | (689) | (690) | (691) | (692) |
| SCT-Ga477 | GYAFTNYL | INPGSGGT | ARTGVYGNFLIFDY | QSLLNSGIQKNY | GAS | QNDHRYPFT |
| | (687) | (1292) | (689) | (690) | (691) | (692) |
| SCT-Ga478 | GYAFTNYL | INPGSGGT | ARTGVYGNFLIFDY | QSLLNSGIQKNY | GAS | QNDHRYPFT |
| | (687) | (1292) | (689) | (690) | (691) | (692) |
| SCT-Ga479 | GFSLTSYG | IWAGGT | ARFPSYRESMDY | ENIYSN | AT | QHFWGTPYT |
| | (906) | (1316) | (1317) | (1318) | (1319) | (1320) |
| SCT-Ga480 | GYAFTNYL | INPGSGGT | ARRGDKYGSAWFAY | QDVSTA | SAS | QQHYSSPRT |
| | (687) | (1292) | (1158) | (757) | (751) | (752) |
| SCT-Ga481 | GYAFTNYL | INPGSGGT | ARRGDKYGSAWFAY | QDVSTA | SAS | QQHYSSPRT |
| | (687) | (1292) | (1158) | (757) | (751) | (752) |
| SCT-Ga482 | GYAFTNYL | INPGSGGT | ARRGDKYGSAWFAY | QDVSTA | SAS | QQHYSSPRT |
| | (687) | (1292) | (1158) | (757) | (751) | (752) |
| SCT-Ga483 | GYAFTNYL | INPGSGGT | ARRGDKYGSAWFAY | QDVSTA | SAS | QQHYSSPRT |
| | (687) | (1292) | (1158) | (757) | (751) | (752) |
| SCT-Ga484 | GYAFTNYL | INPGSGGT | ARTGVYGNFLIFDY | QSLLNSGIQKNY | GAS | QNDHRYPFT |
| | (687) | (1292) | (689) | (690) | (691) | (692) |
| SCT-Ga485 | GYAFTNYL | INPGSGGT | ARTGVYGNFLIFDY | QSLLNSGIQKNY | GAS | QNDHRYPFT |
| | (687) | (1292) | (689) | (690) | (691) | (692) |
| SCT-Ga486 | GYAFTNYL | INPGSGGT | ARTGVYGNFLIFDY | QSLLNSGIQKNY | GAS | QNDHRYPFT |
| | (687) | (1292) | (689) | (690) | (691) | (692) |
| SCT-Ga487 | GYTFSNYW | ILPGSGSA | ARQKYGNFYYFDF | QGIGNY | YTS | HQYSKLPYT |
| | (899) | (913) | (1043) | (1044) | (731) | (1045) |
| SCT-Ga488 | GYTFSNYW | ILPGSGSA | ARQKYGNFYYFDF | QGIGNY | YTS | HQYSKLPYT |
| | (899) | (913) | (1043) | (1044) | (731) | (1045) |
| SCT-Ga489 | GYTFSNYW | ILPGSGSA | ARQKYGNFYYFDF | QGIGNY | YTS | HQYSKLPYT |
| | (899) | (913) | (1043) | (1044) | (731) | (1045) |
| SCT-Ga490 | GYTFSNYW | ILPGSGSA | ARQKYGNFYYFDF | QGIGNY | YTS | HQYSKLPYT |
| | (899) | (913) | (1043) | (1044) | (731) | (1045) |
| SCT-Ga491 | GYTFSNYW | ILPGSGSA | ARQKYGNFYYFDF | QGIGNY | YTS | HQYSKLPYT |
| | (899) | (913) | (1043) | (1044) | (731) | (1045) |
| SCT-Ga492 | GYTFSNYW | ILPGSGSA | ARQKYGNFYYFDF | QGIGNY | YTS | HQYSKLPYT |
| | (899) | (913) | (1043) | (1044) | (731) | (1045) |
| SCT-Ga493 | GFAFSSFD | ISSGGSYT | TRQDYRYPYIMDY | QNINVW | KAS | QQGQSYPWT |
| | (1058) | (814) | (1059) | (790) | (791) | (924) |
| SCT-Ga494 | GFAFSSFD | ISSGGSYT | TRQDYRYPYIMDY | QNINVW | KAS | QQGQSYPWT |
| | (1058) | (814) | (1059) | (790) | (791) | (924) |
| SCT-Ga495 | GFAFSSFD | ISSGGSYT | TRQDYRYPYIMDY | QNINVW | KAS | QQGQSYPWT |
| | (1058) | (814) | (1059) | (790) | (791) | (924) |
| SCT-Ga496 | GFAFSSFD | ISSGGSYT | TRQDYRYPYIMDY | QNINVW | KAS | QQGQSYPWT |
| | (1058) | (814) | (1059) | (790) | (791) | (924) |
| SCT-Ga497 | GYAFTNYL | INPGSGGT | ARRGDKYGSAWFAY | QDVSTA | SAS | QQHYSSPRT |
| | (687) | (1292) | (1158) | (757) | (751) | (752) |
| SCT-Ga498 | GYAFTNYL | INPGSGGT | ARRGDKYGSAWFAY | QDVSTA | SAS | QQHYSSPRT |
| | (687) | (1292) | (1158) | (757) | (751) | (752) |

TABLE 5

| | | SEQ | | SEQ |
|---|---|---|---|---|
| | | ID | | ID |
| mAb AA ID | V_{H} Amino Acid Sequence | NO: | V_{L} Amino Acid Sequence | NO: |
| SCT-Ga001 | QVQLQQSGAELVRPGTSVKVSCKASGYAFTNYL | 4 | DIVLTQSPSSLSVAAGEKVTLSCKSSQSLLNSG | 380 |
| | IEWVKQRPGQGLEWIGVINPGSGGSKYNEKFKG | | IQKNYLAWYQQKPGQPPKLLIYGASTRESGVPD | |
| | KTTLTADKSSSTAYMQLSSLTSEDSAVYFCART | | RFTGSGSGTDFTLTISSVQAEDLAVYYCQNDHR | |
| | GVYGNFLIFDYWGQGTTLTVSS | | YPFTFGGGTKLEIK | |
| SCT-Ga002 | DVQLQVSGPALVKPSQTVSLTCTVTGYSITNGN | 5 | DVVMTQTPLTLSVTIGQPASISCKSSQSLLDSD | 381 |
| | HWWNWIRQVSGSKLEWIGYITSSGRTDSNPSLK | | GKTYLNWLLQRPGQSPKRLIYLVSKLDSGVPDR | |
| | SRISITRDTSKNQLFLQLNSVTTEDIATYYCAR | | FTGSGSGTDFTLKISRVEAEDLGVYYCWQGTHF | |
| | EGGWLPPVWGTGTTVTVSS | | PYTFGGGTKLEIK | |
| SCT-Ga003 | DVQLQESGPALVKPSQTVSLTCTVTGYSITNGN | 6 | DVVMTQTPLTLSVTIGQPASISCKSSQSLLDSD | 381 |
| | HWWNWIRQVSGSKLEWIGYITSSGRTDSNPSLK | | GKTYLNWLLQRPGQSPKRLIYLVSKLDSGVPDR | |
| | SRISITRDTSKNQLFLQLNSVTTEDIATYYCAR | | FTGSGSGTDFTLKISRVEAEDLGVYYCWQGTHF | |
| | EGGWLPPVWGTGTTVTVSS | | PYTFGGGTKLEIK | |
| SCT-Ga004 | DVQLQESGPALVKPSQTVSLTCTVTGYSITNGN | 7 | DVVMTQTPLTLSVAIGQPASISCKSSQSLLDSD | 382 |
| | HWWNWIRQVSGSKLEWIGYITSSGRTDSNPSLK | | GKTYLNWLLQRPGQSPKRLIYLVSKLDSGVPNR | |
| | SRISITRDTSKNQLFLQLNSVITEDIATYYCAR | | FTGSGSGTDFTLKISRVEAEDLGVYYCWQGTHF | |
| | EGGWLPPVWGTGTTVTVSS | | PYTFGGGTKLEIK | |
| SCT-Ga005 | DVQLQESGPALVKPSQTVSLTCTVTGYSITNGN | 8 | DVVMTQTPLTLSVTIGQPASISCKSSQSLLDSD | 381 |
| | HWWMWTRQVSGSKLEWIGYITSSGRTDSNPSLK | | GKTYLNWLLQRPGQSPKRLIYLVSKLDSGVPDR | |
| | SRISITRDTSKNQLFLQLNSVTTEEIATYYCAR | | FTGSGSGTDFTLKISRVEAEDLGVYYCWQGTHF | |
| | EGGWLPPVWGTGTTVTVSS | | PYTFGGGTKLEIK | |
| SCT-Ga006 | DVQLQESGPALVKPSQTVSLTCTVTGYSITNGN | 9 | DVVMTQTPLTLSVTIGQPASISCKSSQSLLDSD | 381 |
| | HWWNWTRQVSGSKLEWIGYITSSGRTDSNPSLK | | GKTYLNWLLQRPGQSPKRLIYLVSKLDSGVPDR | |
| | SRISITRDTSKNQLFLQLTSVTTEDIATYYCAR | | FTGSGSGTDFTLKISRVEAEDLGVYYCWQGTHF | |
| | EGGWLPPVWGTGTTVTVSS | | PYTFGGGTKLEIK | |
| SCT-Ga007 | EVKLVESGGGLVQPGGSLSLSCAASGFTFTDHY | 10 | DIKMTQSPSSIYAYLGERVTITCKASQDINSYL | 383 |
| | MSWVRQPPGKALEWLGFIRNKVNGYTTEYSASV | | SWFQQKPGKSPKTLIYRANRLLDGVPSRFSGSG | |
| | KGRFSISRDNSQSILYLQMNALRAEDSATYYCA | | SGQDYSLTISSLEYEDMGIYYCLQYDELYTFGG | |
| | RYIPYYDPFDYWGQGTTLTVSS | | GTKLEIK | |
| SCT-Ga008 | DVQLQESGPALVKPSQTVSLTCTVTGYSITNGN | 11 | DVVMTQTPLTLSVTIGQPASISCKSSQSLLDSD | 381 |
| | HWWMWTRQVSGSKLEWIGYITSSGRTDSNPSLK | | GKTYLNWLLQRPGQSPKRLIYLVSKLDSGVPDR | |
| | SRISITRDTSKNQFFLQLNSVPAEDIATYYCSR | | FTGSGSGTDFTLKISRVEAEDLGVYYCWQGTHF | |
| | EGGWLPPVWGTGTTVTVSS | | PYTFGGGTKLEIK | |
| SCT-Ga009 | EVQLQQSGPVLVKPGASVKMSCKASGYTFTDYY | 12 | DVVMTQTPLTLSVTFGQPASISCKSSQSLLDSD | 384 |
| | MNWVKQSHGKSLEWTGVTNPYNGGTSYNQKFKG | | GKTYLNWLLQRPGQSPKRLIYLVSKLDSGVPDR | |
| | KATLTVDKSSSTAYMELNSLTSEDSAVYYCARE | | FTGSGSGTDFTLKISRVEAEDLGVYYCWQGTHF | |
| | GTDWGQGTTLTVSS | | PWTFGGGTKLEIK | |
| SCT-Ga010 | DVQLQESGPALVKPSQTVSLTCTVTGYSITNGN | 13 | DVVMTQTPLTLSVTIGQPASISCKSSQSLLDSD | 385 |
| | HWWNWIRQVSGGKLEWIGYITSSGRTDSNPSLK | | GKTYLNWLLQRPGQSPKRLIYLVSKLDSGVPNR | |
| | SRISITRDTSKNQLFLQLNSVITEDIATYYCAR | | FTGSGSGTDFTLKISRVEAEDLGVYYCWQGTHF | |
| | EGGWLPPVWGTGTTVTVSS | | PYTFGGGTKLEIK | |
| SCT-Ga011 | DVQLQESGPALVKPSQTVSLTCTVTGYSITNGN | 14 | DVVMTQTPLTLSVTIGQPASISCKSSQSLLDSD | 381 |
| | HWWNWIRQVSGSKLEWIGYISSSGRIDSNPSLK | | GKTYLNWLLQRPGQSPKRLIYLVSKLDSGVPDR | |
| | SRISITRDTSKNQIFLQLNSVTTEDIATYYCAR | | FTGSGSGTDFTLKISRVEAEDLGVYYCWQGTHF | |
| | EGGWLPPVWGTGTTVTVSS | | PYTFGGGTKLEIK | |
| SCT-Ga012 | EVQLVESGGDLVKPGGSLKLSCAASGFTFSNYG | 15 | DIQMTQSSSSFSVSLGDRVTITCKASEDIYNRL | 386 |
| | MSWVRQTPDKRLEWVATISTGGSYTYYPDSVKG | | AWYQQKPGNAPRLLISGATSLETGVPSRFSGSG | |
| | RFTISRDNAKNTLYLQMSSLKSEDTAMYYCARP | | SGKDYTLSIISLQTEDVGTYYCQQYWSTPWTFG | |
| | HYYGSSSGNYFDYWGQGTTLTVSS | | GGTKLEIK | |
| SCT-Ga013 | DVQLQASGPALVKPSQTVSLTCTVTGYSITHGN | 16 | DVVMTQTPLTLSVTIGQPASISCKSSQSLLDSD | 381 |
| | HWWNWIRQVSGSKLEWIGYISSSGRIDSNPSLK | | GKTYLNWLLQRPGQSPKRLIYLVSKLDSGVPDR | |
| | SRISITRDTSKNKLFLQLNSVTSEDIATYYCAR | | FTGSGSGTDFTLKISRVEAEDLGVYYCWQGTHF | |
| | EGGWLPPVWGTGTTVTVSS | | PYTFGGGTKLEIK | |
| SCT-Ga014 | DVQLQESGPALVKPSQTVSLTCTVTGYSITNGN | 17 | DVVMTQTPLTLSVTIGQPASISCKSSQSLLDSD | 381 |
| | HWWNWIRQVSGSKLEWIGYITSSGRTDSNPSLQ | | GKTYLNWLLQRPGQSPKRLIYLVSKLDSGVPDR | |
| | SRISITRDTSKNQLFLQLNSVTTEDIATYYCAR | | FTGSGSGTDFTLKISRVEAEDLGVYYCWQGTHF | |
| | EGGWLPPVWGTGTTVTVSS | | PYTFGGGTKLEIK | |
| SCT-Ga015 | DVQLQESGPALVKPSQTVSLTCTVTGYSITNGN | 18 | DVVMTQTPLSLSITIGQPASISCKSSQSLLDSD | 387 |
| | HWWNWIRQVSGSKLEWIGYIRSSGSTDSNPSLK | | GKTYLNWLLQRPGQSPKRLIYLLSKLDSGVPDR | |
| | SRISITRDTSKNQLFLQLNSVTTEDIGTYYCAR | | FTGSGSGTDFTLKISRVEAEDLGVYYCWQGTHF | |
| | EGGWLPPVWGTGTTVTVSS | | PYTFGGGTKLEIK | |
| SCT-Ga016 | QVQLKESGPGLVAPSQSLSLTCTVSGFSLTSYV | 19 | NIMMTQSPSSLAVSAGEKVTMSCKSSQSVLYSS | 388 |
| | ISWVRQPPGKGLEWLGIIWTGGGTNFNSALKSR | | NQKNYLAWYQQKPGQSPKLLIYWASTRESGVPD | |
| | LSISKDNSKSQVFLKMNSLQTDDTARYYCARTR | | RFTGSGSGTDFTLTISSVQAEDLAVYYCHQYLS | |
| | AYYSNWGYFDVWGTGTTVTVSS | | SYTFGGGTKLEIK | |
| SCT-Ga017 | DVQLQASGPALVKPSQTVSLTCTVTGYSITNGN | 20 | DVVMTQTPLTLSVTIGQPASISCKSGQSLLDSD | 389 |
| | HWWNWIRQVSGSKLEWIGYISSSGRTDSNPSLK | | GKTYLNWLLQRPGQSPKRLIYLVSKLDSGVPDR | |
| | SRISFTRDTSKNQLFLHLNSVTTEDMATYYCAR | | FTGSGSGTDFTLKISRVEAEDLGVYYCWQGTHF | |
| | EGGWLPPVWGTGTTVTVSS | | PYTFGGGTKLEIK | |
| SCT-Ga018 | DVQLQASGPALVKPSQTVSLTCTVTGYSITNGN | 21 | DVVMTQTPLTLSVTIGQPASISCKSSQSLLDSD | 381 |
| | HWWNWIRQVSGSKLEWIGYITSSGRTDSNPSLK | | GKTYLNWLLQRPGQSPKRLIYLVSKLDSGVPDR | |
| | SRISITRDTSKNKLFLQLNSVTNEDIATYYCAR | | FTGSGSGTDFTLKISRVEAEDLGVYYCWQGTHF | |
| | EGGWLPPVWGTGTTVTVSS | | PYTFGGGTKLEIK | |
| SCT-Ga019 | DVQLQESGPGLVKPSQSLSLTCSVTGYSITSGY | 22 | DIQMTQSPSSLSASLGGKVTITCKASQDINKYI | 390 |
| | YWNWIRQFPGNKLEWMGYISYDGSNNYNPSLKN | | AWYQHKPGKGPRLLIRYTSTLQPGIPSRFSGSG | |
| | RISITRDTSKNQFFLKLNSVTTEDTATYYCARG | | SGRDYSFSISNLEPEDIATYYCLQYDNLWTFGG | |
| | LYYDYDDYFDYWGQGTTLTVSS | | GTKLEIK | |
| SCT-Ga020 | DVQLQESGPALVKPSQTVSLTCTVTGYSITNGN | 23 | DVVMTQTPLTLSVTIGQPASISCKSSQSLLDSD | 381 |
| | HWWNWIRQVSGGKLEWIGYIRSSGSTDFNPSLK | | GKTYLNWLLQRPGQSPKRLIYLVSKLDSGVPDR | |
| | SRISITRDISKNELFLQLNSVTTEDIATYYCTR | | FTGSGSGTDFTLKISRVEAEDLGVYYCWQGTHF | |
| | EGGWLPPVWGTGTTVTVSS | | PYTFGGGTKLEIK | |
| SCT-Ga021 | DVQLQESGPALVKPSQTVSLTCTVTGYSITNGN | 24 | DVVMTQTPLTLSVTIGHPASISCKSSQSLFDSD | 391 |
| | HWWNWIRQVSGSKLEWIGYITSSGRIDSNPSLK | | GKTYLNWLLQRPGQSPKRLIYLVSKLDSGVPDR | |
| | SRISITRDTSKNQLFLQLNSVTTEDIGTYYCAR | | FTGSGSGTDFTLKISRVEAEDLGVYYCWQGTHF | |
| | EGGWLPPVWGTGTTVTVSS | | PYTFGGGTKLEIK | |
| SCT-Ga022 | DVQLQASGPALVKPSQTVSLTCTVTGYSITNGN | 20 | DVVMTQTPLTLSVTIGQPASISCKSSQSLLDSD | 381 |
| | HWWNWIRQVSGSKLEWIGYISSSGRTDSNPSLK | | GKTYLNWLLQRPGQSPKRLIYLVSKLDSGVPDR | |
| | SRISFTRDTSKNQLFLHLNSVTTEDMATYYCAR | | FTGSGSGTDFTLKISRVEAEDLGVYYCWQGTHF | |
| | EGGWLPPVWGTGTTVTVSS | | PYTFGGGTKLEIK | |
| SCT-Ga023 | DVQLQESGPALVKPSQTVSLTCTVTGYSITNGN | 25 | DVVMTQTPLTLSVTIGQPASISCKSSQSLLDSD | 381 |
| | HWWNWIRQVSGSKLEWIGYISSSGSTDSNPSLN | | GKTYLNWLLQRPGQSPKRLIYLVSKLDSGVPDR | |
| | SRISITRDTSKNQLFLQLNSVTTEDIATYYCAR | | FTGSGSGTDFTLKISRVEAEDLGVYYCWQGTHF | |
| | EGGWLPPVWGTGTTVTVSS | | PYTFGGGTKLEIK | |
| SCT-Ga024 | DVQLQESGPALVKPSQTVSLTCTVTGYSITNGN | 26 | DVVMTQTPLTLSVTIGQPASISCKSSQSLLDSD | 392 |
| | HWWMWTRQVSGSKLEWIGYITSSGRTDSNPSLK | | GKTYLNWLLQRPGQSPKRLIYLVSKLDSGVPDR | |
| | RRISITRDTSKNQFFLQLNSVPTDDVATYYCAR | | FTGSGSGTDFTLKISRVEAEDLGVYYCWQGTHF | |
| | EGGWLPPVWGTGTTVTVSS | | PYTFGGGTRLEIK | |
| SCT-Ga025 | DVQLQESGPALVKPSQTVSLTCTVTGYSITNGN | 27 | DVVMTQTPLTLSVTIGQPASISCKSSQSLLDSD | 381 |
| | HWWNWIRQVSGGKLEWIGYIRSSGSTDSNPSLK | | GKTYLNWLLQRPGQSPKRLIYLVSKLDSGVPDR | |
| | SRISITRDISKNELFLQLNSVTTEDIATYYCTR | | FTGSGSGTDFTLKISRVEAEDLGVYYCWQGTHF | |
| | EGGWLPPVWGTGTTVTVSS | | PYTFGGGTKLEIK | |
| SCT-Ga026 | DVQLQESGPALVKPSQTVSLTCTVTGYSITNGN | 28 | DVVMTQTPLTLSVTIGHPASISCKSTQSLLDID | 393 |
| | HWWNWIRQVSGSKLEWIGYITSSGRTDSNPSLK | | GKTYLNWLLQRPGQSPKRLIYLVSKLDSGVPDR | |
| | SRISITRDTSKNQLFLQLNSVTTEDIVTYYCTR | | FTGSGSGTDFTLKISRVEAEDLGVYYCWQGTHF | |
| | EGGWLPPVWGTGTTVTVSS | | PYTFGGGTKLEIK | |
| SCT-Ga027 | QIQLVQSGPDLKKPGETVKISCKASGYTFTTYG | 29 | DVVMTQTPLSLPVSLGDQASFSCRSSQSLVHSN | 394 |
| | MNWVKQAPGKGLKWMGWINTYSGVPKYTDDFKG | | GNTYLHWYLQKPGQSPKLLIYKISNRFSGVPDR | |
| | RFAFSLETSASTAYLQINNLKNEDTATYFCARY | | FSGSGSGTDFTLKISRVEAEDLGVYFCSQSTHV | |
| | DYDVGFAYWGQGTLVTVSA | | PAFGGGTKLEIK | |
| SCT-Ga028 | DIQLQESGPALVKPSQTVSLTCTVTGYSITNGN | 30 | DVVMTQTPLTLSVTIGQPASISCKSSQSLLDSD | 395 |
| | HWWNWIRQVSGSKLEWIGYISSSGRTDSNPSLK | | GKTYLNWLLQRPGQSPKRLIYLVSKLDSGVPDR | |
| | SRISITRDTSKNKLFLQLNSVTTEDIATYYCAR | | FTGSGSGTDFTLKISRVEADDLGIYYCWQGTHF | |
| | EGGWLPPVWGTGTTVTVSS | | PYTFGGGTKLEIK | |
| SCT-Ga029 | QIQLVQSGPELKKPGETVKISCKASGYTFTTYG | 31 | DVVMTQTPLSLPVSLGDQASISCRSSQSLVHSN | 396 |
| | MNWVKQAPGKGLKWMGWINTFSRVPTYADDFKG | | GNTYLHWYLQKPGQSPKLLIYKVSNRFSGVPDR | |
| | RFAFSLETSASTAYLQINNLTNEDTATYFCARY | | FSGSGSGTDFTLKISRVEAEDLGVYFCSQSTHV | |
| | DYDVGFAYWGQGTLVTVSA | | PTFGGGTKLEIK | |
| SCT-Ga030 | DVQLQESGPALVKPSQTVSLTCTVTGYSITNGN | 32 | DVVMTQTPLTLSVTIGQPASISCKSSQSLLDSD | 381 |
| | HWWNWIRQVSGSKLEWIGYITSSGRTDSNPSLK | | GKTYLNWLLQRPGQSPKRLIYLVSKLDSGVPDR | |
| | SRISITRDTSKNQLFLQLNSVTTEDIATYYCSR | | FTGSGSGTDFTLKISRVEAEDLGVYYCWQGTHF | |
| | EGGWLPPVWGTGTTVTVSS | | PYTFGGGTKLEIK | |
| SCT-Ga031 | DVQLQESGPGLVKPSQTVFLTCTVTGISITTGN | 33 | DIVMTQSHKFMSPSVGDRVSITCRASQDVGTAV | 397 |
| | YKWSWIRQFPGNKLEWIGYIYYSGTITYNPSLT | | AWYQQKPGQSPKLLFYSASYRYTGVPDRFTGGG | |
| | SRTTITRDTPKNQFFLEMNSLTAEDTATYYCAR | | SGTDFTFTISSVQAEDLAVYYCQQHYSSPRTFG | |
| | ETVLRVFDYWGQGTTLTVSS | | GGTKVEIK | |
| SCT-Ga032 | DVQLQASGPALVKPYQTVSLTCTVTGYSITNGH | 34 | DVVMTQTPLTLSVTIGQPASISCKSSQSLLDSD | 381 |
| | HWWNWIRQVSGSKLEWIGYISSSGSTDNNPSLK | | GKTYLNWLLQRPGQSPKRLIYLVSKLDSGVPDR | |
| | SRISITRDTSKNQLFLQLNSVTTEDIATYYCAR | | FTGSGSGTDFTLKISRVEAEDLGVYYCWQGTHF | |
| | EGGWLPPVWGTGTTVTVSS | | PYTFGGGTKLEIK | |
| SCT-Ga033 | DVQLQESGPALVKPSQTVSLTCTVTGYSITNGN | 35 | DVVMTQTPLTLSVTIGQPASISCKSSQSLLDSD | 398 |
| | HWWNWIRQVSGSKLEWIGYITSSGRTDSNPSLR | | GKTYLNWLLQRPGQSPKRLIYLVSKLDSGVPDR | |
| | SRISITRDTSKNKLFLQLNSVTNEEKATYYCAR | | FTGSGSGTDFTLKISRVEAEDLGLYYCWQGTHF | |
| | EGGWLPPVWGTGTTVTVSS | | PYTFGGGTKLEIK | |
| SCT-Ga034 | DVQLQESGPALVKPSQTVSLTCTVTGYSITNGN | 36 | DVVMTQTPLTLSVTIGQPASISCRSSQSLLDSD | 399 |
| | HWWNWVRQVSGSKLEWIGYISSSGRIDSNPSLE | | GKTYLNWLLQRPGQSPKRLIYLVSKLDSGVPDR | |
| | SRISITRDTSKNQLFLQLNSVTTEDIATYYCAR | | FTGSGSGTDFTLKISRVEAEDLGVYYCWQGTHF | |
| | EGGWLPPVWGTGTTVTVSS | | PYTFGGGTKLEIK | |
| SCT-Ga035 | DVQLQESGPALVKPSQTVSLTCTVTGYSITNGN | 37 | DVVMTQTPLTLSVTIGQPASISCKSSQSLLDSD | 400 |
| | HWWNWIRQVSGGKLEWIGYIRSSGSTDRNPSLK | | GKTYLNWLLLRPGQSPKRLIYLVSKLDSGVPDR | |
| | SRISITRDTSKNQLFLQLNSVTNEDIATYYCAR | | FTGSGSGTDFTLKISRVEAEDLGVYYCWQGTHF | |
| | EGGWLPPVWGTGTTVTVSS | | PYTFGGGTKLEIK | |
| SCT-Ga036 | DVQLQESGPALVKPSQTVSLTCTVTGYSITNGN | 38 | DVWTQTPLTLSVTIGQPASISCKSSQSLLDSD | 401 |
| | HWWNWVRQVSGRKLEWIGYITSSGRTDSNPSLK | | GKTYLNWLLQRPGQSPKRLIYLVSKLDSGVPDR | |
| | SRISITRDTSKNHLFLQLNSVTTEDIATYYCAR | | FTGSGSGTDFTLKISRVEAEDLGVYYCWQGTHF | |
| | EGGWLPPVWGTGTTVTVSS | | PYTFGGGTKLEIK | |
| SCT-Ga037 | QVQLQQSDAELVKPGASVKISCKVSGYTFTDHT | 39 | DIVMTQSHKFMSTSVGDRVSITCKASQDVSTAV | 402 |
| | IHWMKQRPEQGLEWIGYIYPRDGSTKYNEKFKG | | AWYQQKPGQSPKLLIYSASYRYTGVPDRFTGSG | |
| | KATLTADKSSSTAYMQLNSLTSEDSAVYFCARR | | SGTDFTFTISSVQAEDLAVYYCQQHYSTPYTFG | |
| | WASGMDYWGQGTSVTVSS | | GGTKLEIK | |
| SCT-Ga038 | QVQLQQSGAELVRPGTSVKVSCKASGYAFTNYL | 40 | DIVLTQSPSSLSVAAGEKVTLSCKSSQSLLNSG | 380 |
| | IEWIKQRPGQGLEWIGVINPGSGGSNCNEKFKA | | IQKNYLAWYQQKPGQPPKLLIYGASTRESGVPD | |
| | KTTLTADKSSSTAYMQLSSLTSEDSAVYFCART | | RFTGSGSGTDFTLTISSVQAEDLAVYYCQNDHR | |
| | GVYGNFLIFDYWGQGTTLTVSS | | YPFTFGGGTKLEIK | |
| SCT-Ga039 | DVQLQASGPALVKPSQTVSLTCTVTGYSITNGN | 41 | DVVMTQTPLTLSVIIGQPASISCKSGQSLLDSD | 403 |
| | HWWNWIRQVSGSKLEWIGYISSSGRTDSNPSLK | | GKTYLNWLLQRPGQSPKRLIYLVSKLDSGVPDR | |
| | SRISFTRDTSKNQLFLLLNSVTTEDMATYYCAR | | FTGSGSGTDFTLKISRVEAEDLGVYYCWQGTHF | |
| | EGGWLPPVWGTGTTVTVSS | | PYTFGGGTKLEIK | |
| SCT-Ga040 | DVQLQESGPALVKPSQTVSLTCTVTGYSITNGN | 42 | DVVMTQTPLTLSVTIGQPASISCKSSQSLLDSD | 398 |
| | HWWNWIRQVSGSKLEWIGYITSSGRTDSNPSLR | | GKTYLNWLLQRPGQSPKRLIYLVSKLDSGVPDR | |
| | SRISITRDISKNKLFLQLNSVTNEEIATYYCAR | | FTGSGSGTDFTLKISRVEAEDLGLYYCWQGTHF | |
| | EGGWLPPVWGTGTTVTVSS | | PYTFGGGTKLEIK | |
| SCT-Ga041 | DVQLQESGPALVKPSQTVSLTCTVTGYSITNGN | 43 | DVVMTQTPLTLSATIGESASIYCKSSQSLLDSD | 404 |
| | HWWNWIRQVSGSKLEWIGYISSSGRTDSNPSLK | | GKTYLNWLLQRPGQSPKRLIYLVSKLDSGVPDR | |
| | SRISITRDTSKNQLFLQLNSVTTEDVATYYCAR | | FTGSGSGTDFTLKISRVEAEDLGVYYCWQGTHF | |
| | EGGWLPPVWGTGTTVTVSS | | PYTFGGGTKLEIK | |
| SCT-Ga042 | DVQLQESGPALVKPSQTVSLTCTVTGYSITNGN | 6 | DVVMTQTPLTLSVTIGQPASISCRSSQSLLDSD | 405 |
| | HWWNWIRQVSGSKLEWIGYITSSGRTDSNPSLK | | GKTYLNWLLQRPGQSPKRLIYLVSKLDSGVPDR | |
| | SRISITRDTSKNQLFLQLNSVTTEDIATYYCAR | | FTGSGSGTDFTLKISGVEAEDLGAYYCWQGTHF | |
| | EGGWLPPVWGTGTTVTVSS | | PYTFGGGTKLEIK | |
| SCT-Ga043 | DVQLQESGPALVKPSQTVSLTCTVTGYSITNGN | 27 | DVVMTQTPLTLSVTIGQPASIFCKSSQSLLDRD | 406 |
| | HWWNWIRQVSGGKLEWIGYIRSSGSTDSNPSLK | | GKTYLNWLLQRPGQSPKRLIYLVSKLDSGVPDR | |
| | SRISITRDISKNELFLQLNSVTTEDIATYYCTR | | FTGSGSGTDFTLKISRVEAEDLGVYYCWQGTHF | |
| | EGGWLPPVWGTGTTVTVSS | | PYTFGGGTKLEIK | |
| SCT-Ga044 | DVQLQESGPALVKPSQTVSLTCTVTGYSITNGN | 23 | DVVMTQTPLTLSVAIGQPASISCKSSQSLLDSD | 382 |
| | HWWNWIRQVSGGKLEWIGYIRSSGSTDFNPSLK | | GKTYLNWLLQRPGQSPKRLIYLVSKLDSGVPNR | |
| | SRISITRDISKNELFLQLNSVTTEDIATYYCTR | | FTGSGSGTDFTLKISRVEAEDLGVYYCWQGTHF | |
| | EGGWLPPVWGTGTTVTVSS | | PYTFGGGTKLEIK | |
| SCT-Ga045 | DVQLQASGPALVKPSQTVSLTCTVTGYSITNGN | 20 | DVVMTQTPLTLSVTIGQPASIFCKSSQSLLDRD | 406 |
| | HWWNWIRQVSGSKLEWIGYISSSGRTDSNPSLK | | GKTYLNWLLQRPGQSPKRLIYLVSKLDSGVPDR | |
| | SRISFTRDTSKNQLFLHLNSVTTEDMATYYCAR | | FTGSGSGTDFTLKISRVEAEDLGVYYCWQGTHF | |
| | EGGWLPPVWGTGTTVTVSS | | PYTFGGGTKLEIK | |
| SCT-Ga046 | DVQLQESGPALVKPSQTVSLTCSVTGYSITNGN | 44 | DVVMTQTPLTLSVTIGQPASISCKSSQSLLDSD | 398 |
| | HWWNWIRQVSGSKLEWIGYITSSGRTDSNPSLR | | GKTYLNWLLQRPGQSPKRLIYLVSKLDSGVPDR | |
| | SRISITRDTSKNKLFLQLNSVTNEDIATYYCAR | | FTGSGSGTDFTLKISRVEAEDLGLYYCWQGTHF | |
| | EGGWLPPVWGTGTTVTVSS | | PYTFGGGTKLEIK | |
| SCT-Ga047 | DVQLQASGPALVKPSQTVSLTCTVTGYSITNGN | 45 | DVVMTQTPLTLSVTIGQPASISCKSSQSLLDSD | 381 |
| | HWWNWIRQVSGSKLEWIGYIRSSGSTDSNPSLK | | GKTYLNWLLQRPGQSPKRLIYLVSKLDSGVPDR | |
| | SRISITRDTSKNKLFLQLKSVTTEDIATYYCAR | | FTGSGSGTDFTLKISRVEAEDLGVYYCWQGTHF | |
| | EGGWLPPVWGTGTTVTVSS | | PYTFGGGTKLEIK | |
| SCT-Ga048 | DVQLQESGPALVKPSQTVSLTCTVTGYSITSGN | 46 | DVVMTQTPLTLSVTIGQPASISCRSSQSLLDSD | 399 |
| | HWWNWVRQVSGSKLEWIGYISSSGRIDSNPSLE | | GKTYLNWLLQRPGQSPKRLIYLVSKLDSGVPDR | |
| | SRISITRDTSKNQLFLQLNSVTTEDIATYYCAR | | FTGSGSGTDFTLKISRVEAEDLGVYYCWQGTHF | |
| | EGGWLPPVWGTGTTVTVSS | | PYTFGGGTKLEIK | |
| SCT-Ga049 | DVQLQESGPGLVKPSQTVFLTCTVTGISITTGN | 47 | DIVMTQSHKFMSTLLGDRVSITCKASQDVSTAV | 407 |
| | YKWSWIRQFPGNKLEWIGYIYYSGTITYNPSLA | | AWYQQKPGQSPKLLIYSASYRYTGVPDRFTGSG | |
| | SRTTITRDTPKNQFFLELSSLTAEDTASYYCAR | | SGTDFTFTISSVQAEDLAVYYCQQHYSSPRTFG | |
| | ETVLRVFDYWGQGTTLTVSS | | GGTKVEIK | |
| SCT-Ga050 | DVQLQASGPALVKPSQTVSLTCTVTGYSITNGN | 21 | DVVMTQTPLTLSVAIGQPASISCKSSQSLLDSD | 382 |
| | HWWNWIRQVSGSKLEWIGYITSSGRTDSNPSLK | | GKTYLNWLLQRPGQSPKRLIYLVSKLDSGVPNR | |
| | SRISITRDTSKNKLFLQLNSVTNEDIATYYCAR | | FTGSGSGTDFTLKISRVEAEDLGVYYCWQGTHF | |
| | EGGWLPPVWGTGTTVTVSS | | PYTFGGGTKLEIK | |
| SCT-Ga051 | QVQLQQSGPELVKPGASVKISCKASGYTFTDYY | 48 | DVVMTQTPLTLSVTIGQPASISCKSSQSLLDSD | 408 |
| | INWVKQRPGQGLEWIGWIFPGSGSTYYNEKFKG | | GKTYLNWLLQRPGQSPKRLIYLVSKLDSGVPDR | |
| | KATLTVDKSSSTTYMLLSSLTSEDSAVYFCARF | | FTGSGSGTDFTLKISRVEAEDLGVYYCWQGTHF | |
| | TVWGTGTTVTVSS | | PHTFGGGTKLEIK | |
| SCT-Ga052 | QVQLKQSGAELVKPGASVKLSCKASGYTFTDYY | 49 | DIQMTQTTSSLSASLGDRVTISCRASQDISNYL | 409 |
| | INWVKQRPGQGLEWIARIYPGSGNTYYNEKFKG | | NWYQQKPDGTVKLLIYYTSRLHSGVPSRFSGSG | |
| | KATLTAEKSSSTAYMQLSSLTSEDSAVYFCARV | | SGTDYSLTISNLEQEDIATYFCQQGNTLPFTFG | |
| | TYYGGYFDYWGQGTTLTVSS | | SGTKLEIK | |
| SCT-Ga053 | DVQLQESGPALVKPSQTVSLTCTVTGYSITNGN | 50 | DVVMTQTPLTLSVTIGQPASISCKSSQSLLDSD | 410 |
| | HWWNWIRQVSGSKLEWIGYISSSGRTDSNPSLK | | GKTYLNWLLQRPGQSPKRLIYLVSKLDSGVPDR | |
| | SRISITRDTSKNQLFLQLNSVTTENIATYYCAR | | FTGSGSGTDFTLKISRVEAEDLGVYYCWQGTHF | |
| | EGGWLPPVWGTGTTVTVSS | | PYTFGGGTKLEIQ | |
| SCT-Ga054 | DVQLQASGPALVKPYQTVSLTCTVTGYSITNGN | 51 | DVVMTQTPLTLSVTIGQAASFSCKSSQSLLDSD | 411 |
| | HWWNWIRQVSGSKLEWIGYIRSSGSTDSNPSLK | | GKTYLNWLLQRPGQSPKRLIYLVSKLDSGVPDR | |
| | SRISITRDTSKNQLFLQLNSVTTEDIATYYCAR | | FTGSGSGTDFTLKISRVEAEDLGVYYCWQGTHF | |
| | EGGWLPPVWGTGTTVTVSS | | PYTFGGGTKLEIK | |
| SCT-Ga055 | QVQLQQSGAELMKPGASVKLSCKAIGYILSGYW | 52 | DIVMTQSHKFMSTSVGDRVSITCKASQDVSKAV | 412 |
| | IEWVKQRPGHGLEWIGEIFPGSGSTNYNEKFKG | | AWYQQKPGQSPKVVIYWASTRHTGVPDRFTGSG | |
| | KATFTADTSSNTAYIQLSSLTTEDSAIYYCARI | | SGTDYTLTISSVQAEDLALYYCQQHYSTPWTFG | |
| | RITTVPYFDFWGQGTTLTVSS | | GGTKLEIK | |
| SCT-Ga056 | QVQLQQPGTELVKPGASVKLSCKTSGYTFTSYW | 53 | DIQMTQSPASLSASVGETVTITCRASVNIHNYL | 413 |
| | MHWVKQRPGQGLEWIGNINPSNGVTNYNEKFKS | | AWYQQKQGKSPQLLVYNAKTLADGVPSRFSGSG | |
| | KATLTVDKSSSTAYMQLSSLTSEDSAVYYCARD | | SGTQSSLKINSLQPEDFGSYYCQHFWSTPYTFG | |
| | YDYFDYWGQGTTLTVSS | | GGTKLEIK | |
| SCT-Ga057 | DVQLQESGPGLVKPSQSLSLTCSVTGYSITSAY | 54 | DIVMTQSQKFMSTSVGDRVSVTCKASQNVGSNV | 414 |
| | YWNWIRQFPGNKLEWMGYISYDGTNNYNPSLKD | | AWYQQKPGQSPKVLIYSASYRYSGVPDRFTGSG | |
| | RISITRDASKNQFFLRLNSVTTEDTATYYCGRG | | SGTDFTLTISNVQSEDLTNYFCQQYNNYPFTFG | |
| | RPFVPYWGQGTLVTVSA | | SGTKLDIK | |
| SCT-Ga058 | DVQLQESGPALVKPSQTVSLTCTVTGYSITNGN | 55 | DVVMTQTPLTLSVTIGQPASISCKSSQSLLDSD | 381 |
| | HWWNWIRQVSGSKLEWIGYITSSGRTDSNPSLK | | GKTYLNWLLQRPGQSPKRLIYLVSKLDSGVPDR | |
| | SRISITRDTSKNKLFLQLNSVTNEDIATYYCAR | | FTGSGSGTDFTLKISRVEAEDLGVYYCWQGTHF | |
| | EGGWLPPVWGTGTTVTVSS | | PYTFGGGTKLEIK | |
| SCT-Ga059 | QVQLQQSDAELVKPGASVKISCKVSGYTFTDHT | 56 | DIVMTQSHKFMSTSVGDRVSITCKASQDVFTAV | 415 |
| | IHWMIQRPEQGLEWIGYIYPRDGSTKYNEKFKG | | AWYQQKPGQSPKLLIYSASYRFTGVPDRFTGSG | |
| | KATLTADKSSSTAYMQLNSLTSEDSAVYFCARR | | SGTDFTFTISSVQAEDLAVYYCQQHYSTPLTFG | |
| | ALPYFDCWGQGTTLTVSS | | AGTKLELR | |
| SCT-Ga060 | DVQLQASGPALVKPSQTVSLTCTVTGYSITNGN | 57 | DVVMTQTPLTLSVTIGQPASISCKSSQSLLDSD | 381 |
| | HWWNWIRQISGSKLEWIGYITSSGRTDSNPSLK | | GKTYLNWLLQRPGQSPKRLIYLVSKLDSGVPDR | |
| | SRISITRDTSKNQLFLQLNSVTTEDIATYYCAR | | FTGSGSGTDFTLKISRVEAEDLGVYYCWQGTHF | |
| | EGGWLPPVWGTGTTVTVSS | | PYTFGGGTKLEIK | |
| SCT-Ga061 | DVQLQESGPALVKPSQTVSLTCTVTGYSITNGN | 58 | DVVMTQTPLTLSVTIGQPASISCKSSQSLLDSD | 381 |
| | HWWNWIRQVSGNKLEWIGYISSSGRTDSNPSLK | | GKTYLNWLLQRPGQSPKRLIYLVSKLDSGVPDR | |
| | SRISITRDTSKNQLFLQLNSVTTEDIATYYCAR | | FTGSGSGTDFTLKISRVEAEDLGVYYCWQGTHF | |
| | EGGWLPPVWGTGTTVTVSS | | PYTFGGGTKLEIK | |
| SCT-Ga062 | DVQLQESGPGLVKPSQTVFLTCTVTGISITTGN | 33 | DIVMTQSHKFMSTSVGDRVSITCKASQDVSTAV | 416 |
| | YKWSWIRQFPGNKLEWIGYIYYSGTITYNPSLT | | AWYQQKPGQSPKLLIYSASYRYTGVPDRFTGSG | |
| | SRTTITRDTPKNQFFLEMNSLTAEDTATYYCAR | | SGTDFTFTISSVQAEDLAVYYCQQHYSSPRTFG | |
| | ETVLRVFDYWGQGTTLTVSS | | GGTKVEIK | |
| SCT-Ga063 | QVQLQQSGAELVRPGTSVKVSCKASGYAFTNYL | 59 | DIVLTQSPSSLSVAAGEKVTLSCKSSQSLLNSG | 417 |
| | IEWVKQRPGQGLEWIGVINPGSGGSNYNEKFKG | | VQKNYLAWYQQKPGRPPKLLIYGASTRESGVPD | |
| | KTTLTADKSSSTAYMQLSSLTSEDSAVYFCART | | RFTGSGSGTDFTLTISSVQAEDLAIYYCQNDHR | |
| | GVYGNFLIFDYWGQGTTLTVSS | | YPFTFGGGTKLEIK | |
| SCT-Ga064 | DVQLQESGPALVKPSQTVSLTCTVTGYSITNGN | 60 | DVVMTQTPLTLSVTIGQPASISCKSSQSLLDSD | 381 |
| | HWWNWIRQVSGNKLEWIGYITSSGRTDSNPSLK | | GKTYLNWLLQRPGQSPKRLIYLVSKLDSGVPDR | |
| | SRISITRDTSKNQLFLQLNSVTTEDIATYYCAR | | FTGSGSGTDFTLKISRVEAEDLGVYYCWQGTHF | |
| | EGGWLPPVWGTGTTVTVSS | | PYTFGGGTKLEIK | |
| SCT-Ga065 | QVQLQQSGAELVRPGTSVKVSCKASGYAFTNYL | 61 | DIVLTQSPSSLRVAAGEKVTLSCKSSQSLLNSG | 418 |
| | IEWVKQRPGQGLEWIGVINPGSGGSNYNEKFKG | | IQKNYLAWYQQKPGQPPKLLIYGASTRESGVPD | |
| | KTTLTADKSSSTAYMQLSSLTSEDSAVYFCART | | RFTGSGSGTDFTLTISSVQAEDLAVYYCQNDHR | |
| | GVYANFLIFDYWGQGTTLTVSS | | YPFTFGGGTKLEIK | |
| SCT-Ga066 | DVQLQASGPALVKPSQTVSLTCTVTGYSITNGN | 20 | DVAMTQTPLTLSVTIGQPASISCKSGQSLLDSD | 419 |
| | HWWNWIRQVSGSKLEWIGYISSSGRTDSNPSLK | | GKTYLNWLLQRPGQSPKRLIYLVSKLDSGVPDR | |
| | SRISFTRDTSKNQLFLHLNSVTTEDMATYYCAR | | FTGSGSGTDFTLTISRVEAEDLGVYYCWQGTHF | |
| | EGGWLPPVWGTGTTVTVSS | | PYTFGGGTKLEIK | |
| SCT-Ga067 | DVQLQESGPALVKPSQTVSLTCTVTGYSITNGN | 62 | DVWTQTPLTLSVTIGQPASISCKSSQSLLDSD | 401 |
| | HWWNWVRQVSGRKLEWIGYITSSGRTDSNPSLK | | GKTYLNWLLQRPGQSPKRLIYLVSKLDSGVPDR | |
| | SRISITRDTSKNQLFLQLNSVTTEDIATYYCAR | | FTGSGSGTDFTLKISRVEAEDLGVYYCWQGTHF | |
| | EGGWLPPVWGTGTTVTVSS | | PYTFGGGTKLEIK | |
| SCT-Ga068 | DVQLQESGPALVKPSQTVSLTCTVTGYSITNGN | 7 | DVVMTQTPLTLSVTIGQPASISCKSSQSLLDSD | 385 |
| | HWWNWIRQVSGSKLEWIGYITSSGRTDSNPSLK | | GKTYLNWLLQRPGQSPKRLIYLVSKLDSGVPNR | |
| | SRISITRDTSKNQLFLQLNSVITEDIATYYCAR | | FTGSGSGTDFTLKISRVEAEDLGVYYCWQGTHF | |
| | EGGWLPPVWGTGTTVTVSS | | PYTFGGGTKLEIK | |
| SCT-Ga069 | DVQLQESGPALVKPSQTVSLTCTVTGYSITNGN | 62 | DVWTQTPLTLSVTTGQPASISCKSSQSLLDSD | 420 |
| | HWWNWVRQVSGRKLEWIGYITSSGRTDSNPSLK | | GKTYLNWLLQRPGQSPKRLIYLVSKLDSGVPDR | |
| | SRISITRDTSKNQLFLQLNSVTTEDIATYYCAR | | FTGSGSGTDFTLKISRVEAEDLGVYYCWQGTHF | |
| | EGGWLPPVWGTGTTVTVSS | | PYTFGGGTKLEIK | |
| SCT-Ga070 | DVQLQVSGPALVMPSQTVSLTCTVTGYSITNGN | 63 | DVVMTQTPLTLSVTIGQPASISCKSSQSLLDSD | 381 |
| | HWWNWIRQVSGSKLEWIGYITSSGRTDSNPSLK | | GKTYLNWLLQRPGQSPKRLIYLVSKLDSGVPDR | |
| | SRISITRDTSKNQLFLQLNSVTTEDIATYFCAR | | FTGSGSGTDFTLKISRVEAEDLGVYYCWQGTHF | |
| | EGGWLPPVWGTGTTVTVSS | | PYTFGGGTKLEIK | |
| SCT-Ga071 | DVQLQESGPALVKPSQTVSLTCTVTGYSITNGN | 62 | DVVMTQTPLTLSVTLGQPASISCKSSQSLLDSD | 421 |
| | HWWNWVRQVSGRKLEWIGYITSSGRTDSNPSLK | | GKTYLNWLLQRPGQSPKRLIYLVSKLDSGVPDR | |
| | SRISITRDTSKNQLFLQLNSVTTEDIATYYCAR | | FTGSGAGTDFTLKISRVEAEDLGVYYCWQGTHF | |
| | EGGWLPPVWGTGTTVTVSS | | PYTFGGGTKLEIK | |
| SCT-Ga072 | DVQLQESGPALVKPSQTVSLTCTVTGYSITNGN | 64 | DVVMTQTPLTLSVTIGQPASISCKSSQSLLDSD | 381 |
| | HWWMWTRQVSGSKLEWIGYITSSGRTDSNPSLK | | GKTYLNWLLQRPGQSPKRLIYLVSKLDSGVPDR | |
| | SRISITRDTSKNQLFLQLNSVTTEYIATYYCAR | | FTGSGSGTDFTLKISRVEAEDLGVYYCWQGTHF | |
| | EGGWLPPVWGTGTTVTVSS | | PYTFGGGTKLEIK | |
| SCT-Ga073 | DVQLQESGPALVKPSQTVSLTCTVTGYSITNGN | 7 | DVVMTQTPLTLSVTIGQPASISCKSSQSLLDSD | 422 |
| | HWWNWIRQVSGSKLEWIGYITSSGRTDSNPSLK | | GKTYLNWLLQRPGQSPKRLIYLLSKLDSGVPNR | |
| | SRISITRDTSKNQLFLQLNSVITEDIATYYCAR | | FTGSGSGTDFTLKISRVEAEDLGVYYCWQGTHF | |
| | EGGWLPPVWGTGTTVTVSS | | PYTFGGGTKLEIK | |
| SCT-Ga074 | QVQLQQPGTELVKPGASVKLSCKASGYTFTSYW | 65 | DIQMNQSPSSLSASLGDTITITCHASQNINVWL | 423 |
| | MHWVKQRPGQGLEWIGNINPSNGGTNYNEKFKT | | SWYQQKPGNIPKLLIYKASNLHTGVPSRFSGSG | |
| | KATLTVDRSSSTAYMQLSRLTSEDSAVYYCARR | | SGTGFTLTISSLQPEDIATYYCQQGQSYPLTFG | |
| | TTVLAGPYFDYWGQGTILTVSS | | SGTKLEIK | |
| SCT-Ga075 | DVQLQASGPALVKPSQTVSLTCTVTGYSITNGN | 66 | DVVMTQTPLTLSVTIGQPASISCKSSQSLLDSD | 424 |
| | HWWNWIRQVSGSKLEWIGYITSSGRTDSNPSLK | | GKTYLNWLLQRPGQSPKRLIYLVSKLDSGVPDR | |
| | SRISITRDTSKNQLFLQLNSVTTEDIATYYCAR | | FTGSGSGTDFSLKISRVEAEDLGVYFCWQGTHF | |
| | EGGWLPPVWGTGTTVTVSS | | PYTFGGGTKLEIK | |
| SCT-Ga076 | DVQLQASGPALVKPSQTVSLTCTVTGYSITNGN | 67 | DVVMTQSPLTLSVTIGQPASISCKSSQSLLDSD | 425 |
| | HWWNWIRQVSGSKLEWIGYITSSGRTDSNPSLK | | GKTYLNWLLQRPGQSPKRLIYLVSKLDSGVPNR | |
| | SRISITRDTSKNQLFLQLNSVITEDIATYYCAR | | FTGSGSGTDFTLKISRVEAEDLGVYYCWQGTHF | |
| | EGGWLPPVWGTGTTVTVSS | | PYTFGGGTKVEIK | |
| SCT-Ga077 | DVQLQESGPALVKPSQTVSLTCTVTGYSITNGN | 55 | DVVMTQTPLTLSVTIGQPASISCKSSQSLLDSD | 426 |
| | HWWNWIRQVSGSKLEWIGYITSSGRTDSNPSLK | | GQTYLNWLLQRPGQSPKRLIYLVSKLDSGVPNR | |
| | SRISITRDTSKNKLFLQLNSVTNEDIATYYCAR | | FTGSGSGTDFTLKISRVEAEDLGVYYCWQGTHF | |
| | EGGWLPPVWGTGTTVTVSS | | PYTFGGGTKLEIK | |
| SCT-Ga078 | DVQLQESGPALVKPSQTVSLTCTVTGYSITNGN | 68 | DVVMTQTPLTLSVTIGQPASISCKSSQSLLDSD | 381 |
| | HWWNWIRQVSGGKLEWIGYIRSSGSTDSNPSLK | | GKTYLNWLLQRPGQSPKRLIYLVSKLDSGVPDR | |
| | SRISITRDISKNELFLQLNSVTTEDIATYFCTR | | FTGSGSGTDFTLKISRVEAEDLGVYYCWQGTHF | |
| | EGGWLPPVWGTGTTVTVSS | | PYTFGGGTKLEIK | |
| SCT-Ga079 | DVQLQASGPALVKPYQTVSLTCTVTGYSITNGN | 69 | DVVMTQTPLTLSVTIGQPASISCKSSQSLLDSD | 381 |
| | HWWNWIRQVSGSKLEWIGFIRSSGSTDSNPSLK | | GKTYLNWLLQRPGQSPKRLIYLVSKLDSGVPDR | |
| | SRISITRDTSKNQLFLQLNSVTTEDIATYYCAR | | FTGSGSGTDFTLKISRVEAEDLGVYYCWQGTHF | |
| | EGGRLPPVWGTGTTVTVSS | | PYTFGGGTKLEIK | |
| SCT-Ga080 | DVQLQESGPALVKPSQTVSLTCTVTGYSITNGN | 62 | DVVMTQTPLTLSVTIGQPASISCKSSQSLLDSD | 381 |
| | HWWNWVRQVSGRKLEWIGYITSSGRTDSNPSLK | | GKTYLNWLLQRPGQSPKRLIYLVSKLDSGVPDR | |
| | SRISITRDTSKNQLFLQLNSVTTEDIATYYCAR | | FTGSGSGTDFTLKISRVEAEDLGVYYCWQGTHF | |
| | EGGWLPPVWGTGTTVTVSS | | PYTFGGGTKLEIK | |
| SCT-Ga081 | DVQLQESGPALVKPSQTVSLTCTVTGYSISNGN | 70 | DVVMTQTPLTLSVTIGQPASISCKSSQSLLDSD | 381 |
| | HWWNWIRQVSGSKLEWIGYITSSGRTDSNPSLK | | GKTYLNWLLQRPGQSPKRLIYLVSKLDSGVPDR | |
| | SRISITRDTSKNQLFLQLNSVTTEDIATYYCAR | | FTGSGSGTDFTLKISRVEAEDLGVYYCWQGTHF | |
| | EGGWLPPVWGTGTTVTVSS | | PYTFGGGTKLEIK | |
| SCT-Ga082 | DVQLQESGPALVKPSQTVSLTCTVTGYSITNGN | 71 | DVVMTQTPLTLSVTIGQPASISCKSSQSLLDSD | 381 |
| | HWWNWVRQVSGSKLEWIGYISSSGRTDNNPSLK | | GKTYLNWLLQRPGQSPKRLIYLVSKLDSGVPDR | |
| | SRISITRDTSKNQLFLQLNSVTTEDIATYYCAR | | FTGSGSGTDFTLKISRVEAEDLGVYYCWQGTHF | |
| | EGGWLPPVWGTGTSVTVSS | | PYTFGGGTKLEIK | |
| SCT-Ga083 | DVQLQESGPALVKPSQTVSLTCTVTGYSITNGN | 36 | DVVMTQTPLTLSVTIGQPASISCKSSQSLLDSD | 381 |
| | HWWNWVRQVSGSKLEWIGYISSSGRIDSNPSLE | | GKTYLNWLLQRPGQSPKRLIYLVSKLDSGVPDR | |
| | SRISITRDTSKNQLFLQLNSVTTEDIATYYCAR | | FTGSGSGTDFTLKISRVEAEDLGVYYCWQGTHF | |
| | EGGWLPPVWGTGTTVTVSS | | PYTFGGGTKLEIK | |
| SCT-Ga084 | DVQLQASGPALVKPSQTVSLTCTVTGYSITNGN | 72 | DVVMTQTPLTLSVTIGQPASISCKSSQSLLDSD | 385 |
| | HWWNWIRQVSGSKLEWIGYITSSGRTDSNPSLK | | GKTYLNWLLQRPGQSPKRLIYLVSKLDSGVPNR | |
| | SRISITRDTSKNQFFLQLNSVITEDIATYYCAR | | FTGSGSGTDFTLKISRVEAEDLGVYYCWQGTHF | |
| | EGGWLPPVWGTGTTVTVSS | | PYTFGGGTKLEIK | |
| SCT-Ga085 | DVQLQESGPALVKPSQTVSLTCTVTGYSITNGN | 73 | DVVMTQTPLTLSVTIGQPASISCKSSQSLLDSD | 381 |
| | HWWNWIRQVSGSKLEWIGYISSSGRIDSNPSLK | | GKTYLNWLLQRPGQSPKRLIYLVSKLDSGVPDR | |
| | SRISITRDTSKNQLFLQLNSVTTEDIGTYYCAR | | FTGSGSGTDFTLKISRVEAEDLGVYYCWQGTHF | |
| | EGGWLPPVWGTGTTVTVSS | | PYTFGGGTKLEIK | |
| SCT-Ga086 | DVQLQESGPALVKPSQTVSLTCTVTGYSITNGN | 74 | DVVMTQTPLTLSVTIGQPASISCKSSQSLLDSD | 381 |
| | HWWNWIRQVSGSKLEWIGYITSSGRTDSNPSLR | | GKTYLNWLLQRPGQSPKRLIYLVSKLDSGVPDR | |
| | SRISITRDTSKNQLLLQLNSVTTEDIATYYCAR | | FTGSGSGTDFTLKISRVEAEDLGVYYCWQGTHF | |
| | EGGWLPPVWGTGTTVTVSS | | PYTFGGGTKLEIK | |
| SCT-Ga087 | EVMLVESGGDLVKPGGSLKLSCAASGFTFSRYI | 75 | DIQMTQSPSSLSASLGERVSLTCRASQDIGSSL | 427 |
| | MSWVRQTPEKRLEWVATISGGGGNTYYPDSVKG | | NWLQQEPDGTIQRLIYATSSLDSGVPKRFSGSR | |
| | RFTISRDNAKNTLYLQVSSLRSEDTALYYCARW | | SGSDYSLTISSLESEDFVDYYCLQYASSPWTFG | |
| | LPSYYAMDYWGQGTSVTVSS | | GGTKLEIK | |
| SCT-Ga056 | QVQLQQPGTELVKPGASVKLSCKTSGYTFTSYW | 53 | DIQMTQSPASLSASVGETVTITCRASVNIHNYL | 413 |
| | MHWVKQRPGQGLEWIGNINPSNGVTNYNEKFKS | | AWYQQKQGKSPQLLVYNAKTLADGVPSRFSGSG | |
| | KATLTVDKSSSTAYMQLSSLTSEDSAVYYCARD | | SGTQSSLKINSLQPEDFGSYYCQHFWSTPYTFG | |
| | YDYFDYWGQGTTLTVSS | | GGTKLEIK | |
| SCT-Ga057 | DVQLQESGPGLVKPSQSLSLTCSVTGYSITSAY | 54 | DIVMTQSQKFMSTSVGDRVSVTCKASQNVGSNV | 414 |
| | YWNWIRQFPGNKLEWMGYISYDGTNNYNPSLKD | | AWYQQKPGQSPKVLIYSASYRYSGVPDRFTGSG | |
| | RISITRDASKNQFFLRLNSVTTEDTATYYCGRG | | SGTDFTLTISNVQSEDLTNYFCQQYNNYPFTFG | |
| | RPFVPYWGQGTLVTVSA | | SGTKLDIK | |
| SCT-Ga058 | DVQLQESGPALVKPSQTVSLTCTVTGYSITNGN | 55 | DVVMTQTPLTLSVTIGQPASISCKSSQSLLDSD | 381 |
| | HWWNWIRQVSGSKLEWIGYITSSGRTDSNPSLK | | GKTYLNWLLQRPGQSPKRLIYLVSKLDSGVPDR | |
| | SRISITRDTSKNKLFLQLNSVTNEDIATYYCAR | | FTGSGSGTDFTLKISRVEAEDLGVYYCWQGTHF | |
| | EGGWLPPVWGTGTTVTVSS | | PYTFGGGTKLEIK | |
| SCT-Ga059 | QVQLQQSDAELVKPGASVKISCKVSGYTFTDHT | 56 | DIVMTQSHKFMSTSVGDRVSITCKASQDVFTAV | 415 |
| | IHWMIQRPEQGLEWIGYIYPRDGSTKYNEKFKG | | AWYQQKPGQSPKLLIYSASYRFTGVPDRFTGSG | |
| | KATLTADKSSSTAYMQLNSLTSEDSAVYFCARR | | SGTDFTFTISSVQAEDLAVYYCQQHYSTPLTFG | |
| | ALPYFDCWGQGTTLTVSS | | AGTKLELR | |
| SCT-Ga060 | DVQLQASGPALVKPSQTVSLTCTVTGYSITNGN | 57 | DVVMTQTPLTLSVTIGQPASISCKSSQSLLDSD | 381 |
| | HWWNWIRQISGSKLEWIGYITSSGRTDSNPSLK | | GKTYLNWLLQRPGQSPKRLIYLVSKLDSGVPDR | |
| | SRISITRDTSKNQLFLQLNSVTTEDIATYYCAR | | FTGSGSGTDFTLKISRVEAEDLGVYYCWQGTHF | |
| | EGGWLPPVWGTGTTVTVSS | | PYTFGGGTKLEIK | |
| SCT-Ga061 | DVQLQESGPALVKPSQTVSLTCTVTGYSITNGN | 58 | DVVMTQTPLTLSVTIGQPASISCKSSQSLLDSD | 381 |
| | HWWNWIRQVSGNKLEWIGYISSSGRTDSNPSLK | | GKTYLNWLLQRPGQSPKRLIYLVSKLDSGVPDR | |
| | SRISITRDTSKNQLFLQLNSVTTEDIATYYCAR | | FTGSGSGTDFTLKISRVEAEDLGVYYCWQGTHF | |
| | EGGWLPPVWGTGTTVTVSS | | PYTFGGGTKLEIK | |
| SCT-Ga062 | DVQLQESGPGLVKPSQTVFLTCTVTGISITTGN | 33 | DIVMTQSHKFMSTSVGDRVSITCKASQDVSTAV | 416 |
| | YKWSWIRQFPGNKLEWIGYIYYSGTITYNPSLT | | AWYQQKPGQSPKLLIYSASYRYTGVPDRFTGSG | |
| | SRTTITRDTPKNQFFLEMNSLTAEDTATYYCAR | | SGTDFTFTISSVQAEDLAVYYCQQHYSSPRTFG | |
| | ETVLRVFDYWGQGTTLTVSS | | GGTKVEIK | |
| SCT-Ga063 | QVQLQQSGAELVRPGTSVKVSCKASGYAFTNYL | 59 | DIVLTQSPSSLSVAAGEKVTLSCKSSQSLLNSG | 417 |
| | IEWVKQRPGQGLEWIGVINPGSGGSNYNEKFKG | | VQKNYLAWYQQKPGRPPKLLIYGASTRESGVPD | |
| | KTTLTADKSSSTAYMQLSSLTSEDSAVYFCART | | RFTGSGSGTDFTLTISSVQAEDLAIYYCQNDHR | |
| | GVYGNFLIFDYWGQGTTLTVSS | | YPFTFGGGTKLEIK | |
| SCT-Ga064 | DVQLQESGPALVKPSQTVSLTCTVTGYSITNGN | 60 | DVVMTQTPLTLSVTIGQPASISCKSSQSLLDSD | 381 |
| | HWWNWIRQVSGNKLEWIGYITSSGRTDSNPSLK | | GKTYLNWLLQRPGQSPKRLIYLVSKLDSGVPDR | |
| | SRISITRDTSKNQLFLQLNSVTTEDIATYYCAR | | FTGSGSGTDFTLKISRVEAEDLGVYYCWQGTHF | |
| | EGGWLPPVWGTGTTVTVSS | | PYTFGGGTKLEIK | |
| SCT-Ga065 | QVQLQQSGAELVRPGTSVKVSCKASGYAFTNYL | 61 | DIVLTQSPSSLRVAAGEKVTLSCKSSQSLLNSG | 418 |
| | IEWVKQRPGQGLEWIGVINPGSGGSNYNEKFKG | | IQKNYLAWYQQKPGQPPKLLIYGASTRESGVPD | |
| | KTTLTADKSSSTAYMQLSSLTSEDSAVYFCART | | RFTGSGSGTDFTLTISSVQAEDLAVYYCQNDHR | |
| | GVYANFLIFDYWGQGTTLTVSS | | YPFTFGGGTKLEIK | |
| SCT-Ga066 | DVQLQASGPALVKPSQTVSLTCTVTGYSITNGN | 20 | DVAMTQTPLTLSVTIGQPASISCKSGQSLLDSD | 419 |
| | HWWNWIRQVSGSKLEWIGYISSSGRTDSNPSLK | | GKTYLNWLLQRPGQSPKRLIYLVSKLDSGVPDR | |
| | SRISFTRDTSKNQLFLHLNSVTTEDMATYYCAR | | FTGSGSGTDFTLTISRVEAEDLGVYYCWQGTHF | |
| | EGGWLPPVWGTGTTVTVSS | | PYTFGGGTKLEIK | |
| SCT-Ga067 | DVQLQESGPALVKPSQTVSLTCTVTGYSITNGN | 62 | DVVVTQTPLTLSVTIGQPASISCKSSQSLLDSD | 401 |
| | HWWNWVRQVSGRKLEWIGYITSSGRTDSNPSLK | | GKTYLNWLLQRPGQSPKRLIYLVSKLDSGVPDR | |
| | SRISITRDTSKNQLFLQLNSVTTEDIATYYCAR | | FTGSGSGTDFTLKISRVEAEDLGVYYCWQGTHF | |
| | EGGWLPPVWGTGTTVTVSS | | PYTFGGGTKLEIK | |
| SCT-Ga068 | DVQLQESGPALVKPSQTVSLTCTVTGYSITNGN | 7 | DVVMTQTPLTLSVTIGQPASISCKSSQSLLDSD | 385 |
| | HWWNWIRQVSGSKLEWIGYITSSGRTDSNPSLK | | GKTYLNWLLQRPGQSPKRLIYLVSKLDSGVPNR | |
| | SRISITRDTSKNQLFLQLNSVITEDIATYYCAR | | FTGSGSGTDFTLKISRVEAEDLGVYYCWQGTHF | |
| | EGGWLPPVWGTGTTVTVSS | | PYTFGGGTKLEIK | |
| SCT-Ga069 | DVQLQESGPALVKPSQTVSLTCTVTGYSITNGN | 62 | DVVVTQTPLTLSVTTGQPASISCKSSQSLLDSD | 420 |
| | HWWNWVRQVSGRKLEWIGYITSSGRTDSNPSLK | | GKTYLNWLLQRPGQSPKRLIYLVSKLDSGVPDR | |
| | SRISITRDTSKNQLFLQLNSVTTEDIATYYCAR | | FTGSGSGTDFTLKISRVEAEDLGVYYCWQGTHF | |
| | EGGWLPPVWGTGTTVTVSS | | PYTFGGGTKLEIK | |
| SCT-Ga070 | DVQLQVSGPALVMPSQTVSLTCTVTGYSITNGN | 63 | DVVMTQTPLTLSVTIGQPASISCKSSQSLLDSD | 381 |
| | HWWNWIRQVSGSKLEWIGYITSSGRTDSNPSLK | | GKTYLNWLLQRPGQSPKRLIYLVSKLDSGVPDR | |
| | SRISITRDTSKNQLFLQLNSVTTEDIATYFCAR | | FTGSGSGTDFTLKISRVEAEDLGVYYCWQGTHF | |
| | EGGWLPPVWGTGTTVTVSS | | PYTFGGGTKLEIK | |
| SCT-Ga071 | DVQLQESGPALVKPSQTVSLTCTVTGYSITNGN | 62 | DVVMTQTPLTLSVTLGQPASISCKSSQSLLDSD | 421 |
| | HWWNWVRQVSGRKLEWIGYITSSGRTDSNPSLK | | GKTYLNWLLQRPGQSPKRLIYLVSKLDSGVPDR | |
| | SRISITRDTSKNQLFLQLNSVTTEDIATYYCAR | | FTGSGAGTDFTLKISRVEAEDLGVYYCWQGTHF | |
| | EGGWLPPVWGTGTTVTVSS | | PYTFGGGTKLEIK | |
| SCT-Ga072 | DVQLQESGPALVKPSQTVSLTCTVTGYSITNGN | 64 | DVVMTQTPLTLSVTIGQPASISCKSSQSLLDSD | 381 |
| | HWWNWIRQVSGSKLEWIGYITSSGRTDSNPSLK | | GKTYLNWLLQRPGQSPKRLIYLVSKLDSGVPDR | |
| | SRISITRDTSKNQLFLQLNSVTTEYIATYYCAR | | FTGSGSGTDFTLKISRVEAEDLGVYYCWQGTHF | |
| | EGGWLPPVWGTGTTVTVSS | | PYTFGGGTKLEIK | |
| SCT-Ga073 | DVQLQESGPALVKPSQTVSLTCTVTGYSITNGN | 7 | DVVMTQTPLTLSVTIGQPASISCKSSQSLLDSD | 422 |
| | HWWNWIRQVSGSKLEWIGYITSSGRTDSNPSLK | | GKTYLNWLLQRPGQSPKRLIYLLSKLDSGVPNR | |
| | SRISITRDTSKNQLFLQLNSVITEDIATYYCAR | | FTGSGSGTDFTLKISRVEAEDLGVYYCWQGTHF | |
| | EGGWLPPVWGTGTTVTVSS | | PYTFGGGTKLEIK | |
| SCT-Ga074 | QVQLQQPGTELVKPGASVKLSCKASGYTFTSYW | 65 | DIQMNQSPSSLSASLGDTITITCHASQNINVWL | 423 |
| | MHWVKQRPGQGLEWIGNINPSNGGTNYNEKFKT | | SWYQQKPGNIPKLLIYKASNLHTGVPSRFSGSG | |
| | KATLTVDRSSSTAYMQLSRLTSEDSAVYYCARR | | SGTGFTLTISSLQPEDIATYYCQQGQSYPLTFG | |
| | TTVLAGPYFDYWGQGTILTVSS | | SGTKLEIK | |
| SCT-Ga075 | DVQLQASGPALVKPSQTVSLTCTVTGYSITNGN | 66 | DVVMTQTPLTLSVTIGQPASISCKSSQSLLDSD | 424 |
| | HWWNWIRQVSGSKLEWIGYITSSGRTDSNPSLK | | GKTYLNWLLQRPGQSPKRLIYLVSKLDSGVPDR | |
| | SRISITRDTSKNQLFLQLNSVTTEDIATYYCAR | | FTGSGSGTDFSLKISRVEAEDLGVYFCWQGTHF | |
| | EGGWLPPVWGTGTTVTVSS | | PYTFGGGTKLEIK | |
| SCT-Ga076 | DVQLQASGPALVKPSQTVSLTCTVTGYSITNGN | 67 | DVVMTQSPLTLSVTIGQPASISCKSSQSLLDSD | 425 |
| | HWWNWIRQVSGSKLEWIGYITSSGRTDSNPSLK | | GKTYLNWLLQRPGQSPKRLIYLVSKLDSGVPNR | |
| | SRISITRDTSKNQLFLQLNSVITEDIATYYCAR | | FTGSGSGTDFTLKISRVEAEDLGVYYCWQGTHF | |
| | EGGWLPPVWGTGTTVTVSS | | PYTFGGGTKVEIK | |
| SCT-Ga077 | DVQLQESGPALVKPSQTVSLTCTVTGYSITNGN | 55 | DVVMTQTPLTLSVTIGQPASISCKSSQSLLDSD | 426 |
| | HWWNWIRQVSGSKLEWIGYITSSGRTDSNPSLK | | GQTYLNWLLQRPGQSPKRLIYLVSKLDSGVPNR | |
| | SRISITRDTSKNKLFLQLNSVTNEDIATYYCAR | | FTGSGSGTDFTLKISRVEAEDLGVYYCWQGTHF | |
| | EGGWLPPVWGTGTTVTVSS | | PYTFGGGTKLEIK | |
| SCT-Ga078 | DVQLQESGPALVKPSQTVSLTCTVTGYSITNGN | 68 | DVVMTQTPLTLSVTIGQPASISCKSSQSLLDSD | 381 |
| | HWWNWIRQVSGGKLEWIGYIRSSGSTDSNPSLK | | GKTYLNWLLQRPGQSPKRLIYLVSKLDSGVPDR | |
| | SRISITRDISKNELFLQLNSVTTEDIATYFCTR | | FTGSGSGTDFTLKISRVEAEDLGVYYCWQGTHF | |
| | EGGWLPPVWGTGTTVTVSS | | PYTFGGGTKLEIK | |
| SCT-Ga079 | DVQLQASGPALVKPYQTVSLTCTVTGYSITNGN | 69 | DVVMTQTPLTLSVTIGQPASISCKSSQSLLDSD | 381 |
| | HWWNWIRQVSGSKLEWIGFIRSSGSTDSNPSLK | | GKTYLNWLLQRPGQSPKRLIYLVSKLDSGVPDR | |
| | SRISITRDTSKNQLFLQLNSVTTEDIATYYCAR | | FTGSGSGTDFTLKISRVEAEDLGVYYCWQGTHF | |
| | EGGRLPPVWGTGTTVTVSS | | PYTFGGGTKLEIK | |
| SCT-Ga080 | DVQLQESGPALVKPSQTVSLTCTVTGYSITNGN | 62 | DVVMTQTPLTLSVTIGQPASISCKSSQSLLDSD | 381 |
| | HWWNWVRQVSGRKLEWIGYITSSGRTDSNPSLK | | GKTYLNWLLQRPGQSPKRLIYLVSKLDSGVPDR | |
| | SRISITRDTSKNQLFLQLNSVTTEDIATYYCAR | | FTGSGSGTDFTLKISRVEAEDLGVYYCWQGTHF | |
| | EGGWLPPVWGTGTTVTVSS | | PYTFGGGTKLEIK | |
| SCT-Ga081 | DVQLQESGPALVKPSQTVSLTCTVTGYSISNGN | 70 | DVVMTQTPLTLSVTIGQPASISCKSSQSLLDSD | 381 |
| | HWWNWIRQVSGSKLEWIGYITSSGRTDSNPSLK | | GKTYLNWLLQRPGQSPKRLIYLVSKLDSGVPDR | |
| | SRISITRDTSKNQLFLQLNSVTTEDIATYYCAR | | FTGSGSGTDFTLKISRVEAEDLGVYYCWQGTHF | |
| | EGGWLPPVWGTGTTVTVSS | | PYTFGGGTKLEIK | |
| SCT-Ga082 | DVQLQESGPALVKPSQTVSLTCTVTGYSITNGN | 71 | DVVMTQTPLTLSVTIGQPASISCKSSQSLLDSD | 381 |
| | HWWNWVRQVSGSKLEWIGYISSSGRTDNNPSLK | | GKTYLNWLLQRPGQSPKRLIYLVSKLDSGVPDR | |
| | SRISITRDTSKNQLFLQLNSVTTEDIATYYCAR | | FTGSGSGTDFTLKISRVEAEDLGVYYCWQGTHF | |
| | EGGWLPPVWGTGTSVTVSS | | PYTFGGGTKLEIK | |
| SCT-Ga083 | DVQLQESGPALVKPSQTVSLTCTVTGYSITNGN | 36 | DVVMTQTPLTLSVTIGQPASISCKSSQSLLDSD | 381 |
| | HWWNWVRQVSGSKLEWIGYISSSGRIDSNPSLE | | GKTYLNWLLQRPGQSPKRLIYLVSKLDSGVPDR | |
| | SRISITRDTSKNQLFLQLNSVTTEDIATYYCAR | | FTGSGSGTDFTLKISRVEAEDLGVYYCWQGTHF | |
| | EGGWLPPVWGTGTTVTVSS | | PYTFGGGTKLEIK | |
| SCT-Ga084 | DVQLQASGPALVKPSQTVSLTCTVTGYSITNGN | 72 | DVVMTQTPLTLSVTIGQPASISCKSSQSLLDSD | 385 |
| | HWWNWIRQVSGSKLEWIGYITSSGRTDSNPSLK | | GKTYLNWLLQRPGQSPKRLIYLVSKLDSGVPNR | |
| | SRISITRDTSKNQFFLQLNSVITEDIATYYCAR | | FTGSGSGTDFTLKISRVEAEDLGVYYCWQGTHF | |
| | EGGWLPPVWGTGTTVTVSS | | PYTFGGGTKLEIK | |
| SCT-Ga085 | DVQLQESGPALVKPSQTVSLTCTVTGYSITNGN | 73 | DVVMTQTPLTLSVTIGQPASISCKSSQSLLDSD | 381 |
| | HWWNWIRQVSGSKLEWIGYISSSGRIDSNPSLK | | GKTYLNWLLQRPGQSPKRLIYLVSKLDSGVPDR | |
| | SRISITRDTSKNQLFLQLNSVTTEDIGTYYCAR | | FTGSGSGTDFTLKISRVEAEDLGVYYCWQGTHF | |
| | EGGWLPPVWGTGTTVTVSS | | PYTFGGGTKLEIK | |
| SCT-Ga086 | DVQLQESGPALVKPSQTVSLTCTVTGYSITNGN | 74 | DVVMTQTPLTLSVTIGQPASISCKSSQSLLDSD | 381 |
| | HWWNWIRQVSGSKLEWIGYITSSGRTDSNPSLR | | GKTYLNWLLQRPGQSPKRLIYLVSKLDSGVPDR | |
| | SRISITRDTSKNQLLLQLNSVTTEDIATYYCAR | | FTGSGSGTDFTLKISRVEAEDLGVYYCWQGTHF | |
| | EGGWLPPVWGTGTTVTVSS | | PYTFGGGTKLEIK | |
| SCT-Ga087 | EVMLVESGGDLVKPGGSLKLSCAASGFTFSRYI | 75 | DIQMTQSPSSLSASLGERVSLTCRASQDIGSSL | 427 |
| | MSWVRQTPEKRLEWVATISGGGGNTYYPDSVKG | | NWLQQEPDGTIQRLIYATSSLDSGVPKRFSGSR | |
| | RFTISRDNAKNTLYLQVSSLRSEDTALYYCARW | | SGSDYSLTISSLESEDFVDYYCLQYASSPWTFG | |
| | LPSYYAMDYWGQGTSVTVSS | | GGTKLEIK | |
| SCT-Ga088 | EVMLVESGGDLVKPGGSLKLSCAASGFTFSRYI | 75 | DIQMNQSPSSLSASLGDTITITCHASQNINIWL | 428 |
| | MSWVRQTPEKRLEWVATISGGGGNTYYPDSVKG | | NWYQQKPGNIPKLLIYKASNLHTGVPSRFSGSG | |
| | RFTISRDNAKNTLYLQVSSLRSEDTALYYCARW | | SGTGFTLIISSLQPEDIATYYCQQGQSYPYTFG | |
| | LPSYYAMDYWGQGTSVTVSS | | GGTKLEIK | |
| SCT-Ga089 | DVQLQASGPALVKPSQTVSLTCTVTGYSITNGN | 76 | DVVMTQTPLTLSVTIGQPASISCKSSQSLLDSD | 385 |
| | HWWNWIRQVSGSKLEWIGYITSSGRTDSNPSLK | | GKTYLNWLLQRPGQSPKRLIYLVSKLDSGVPNR | |
| | SRISITRDTFKNQFFLQLNSVITEDIATYYCAR | | FTGSGSGTDFTLKISRVEAEDLGVYYCWQGTHF | |
| | EGGWLPPVWGTGTTVTVSS | | PYTFGGGTKLEIK | |
| SCT-Ga090 | DVQLQVSGPALVMPSQTVSLTCTVTGYSITNGN | 77 | DVVMTQTPLTLSVTIGQPASISCKSSQSLLDSD | 381 |
| | HWWNWIRQVSGSKLEWIGYITSSGRTDSNPSLK | | GKTYLNWLLQRPGQSPKRLIYLVSKLDSGVPDR | |
| | SRISITRDTSKNQLFLQLNSVTTEDIATYYCAR | | FTGSGSGTDFTLKISRVEAEDLGVYYCWQGTHF | |
| | EGGWLPPVWGTGTTVTVSS | | PYTFGGGTKLEIK | |
| SCT-Ga091 | DVQLQASGPALVKPSQTVSLTCTVTGYSITNGN | 78 | DVVMTQTPLTLSVTIGQPASISCKSSQSLLDSD | 381 |
| | HWWNWIRQVSGSKLEWIGYIRSSGSTDSNPSLK | | GKTYLNWLLQRPGQSPKRLIYLVSKLDSGVPDR | |
| | SRISITRDTSKNQLFLQLNSVTTEDIATYYCAR | | FTGSGSGTDFTLKISRVEAEDLGVYYCWQGTHF | |
| | EGGWLPPVWGTGTTVTVSS | | PYTFGGGTKLEIK | |
| SCT-Ga092 | EVMLVESGGGLVKPGGSLKLSCAASGFTFSSYT | 79 | DIQMTQSPSSLSASLGERVSLTCRASQDIGSSL | 429 |
| | MSWVRQTPEKRLEWVATISGGGGNTYYPDSVKG | | NWLQQEPDGTIKRLIYATSSLDSGVPKRFSGSR | |
| | RFTISRDNAKNTLYLQMSSLRSEDTALYYCARW | | SGSDYSLTISSLESEDFVDYYCLQYVSCPWTFG | |
| | LLTYYAMDYWGQGTSVTVSS | | GGTKVEIK | |
| SCT-Ga093 | QVQLQQSGPELVKPGASVRISCKASGYTFTDCY | 80 | DIQMNQSPSSLSASLGDTITITCHASQNINVWL | 430 |
| | INWVKLRPGQGLEWIGWIFPGSDFTYYNEKFKG | | SWYQQKPGNIPKLLIYKASNLHTGVPSRFRGSG | |
| | KATLTVDTSSSTAYMLFSSLTSEDSAVYFCARY | | SGTGFTLSISSLQPEDIATYYCQQGQSYPLTFG | |
| | GLGHYFDYWGQGTTLTVSS | | GGTKLEIK | |
| SCT-Ga094 | DVQLQASGPALVKPSQTVSLTCTVTGYSITNGN | 67 | DVVMTQTPLTLSVTIGQPASISCKSSQSLLDSD | 381 |
| | HWWNWIRQVSGSKLEWIGYITSSGRTDSNPSLK | | GKTYLNWLLQRPGQSPKRLIYLVSKLDSGVPDR | |
| | SRISITRDTSKNQLFLQLNSVITEDIATYYCAR | | FTGSGSGTDFTLKISRVEAEDLGVYYCWQGTHF | |
| | EGGWLPPVWGTGTTVTVSS | | PYTFGGGTKLEIK | |
| SCT-Ga095 | QIQLQQSGPELVKSGASVKISCKASGYTFTAYC | 81 | DIQMNQSPSSLSASLGDTITITCHASQNINVWL | 431 |
| | INWVKQRPGQGLEWIGWIFPGSGSTNYNEKFKG | | SWYQQKPGNIPKLLIYKASNLHTGVPSRFSGSG | |
| | KATYTVDKSSSTAYMLLSSLTSEDSAVYFCARY | | SGTGFTLTISSLQPEDIATYYCQQGQSYPLTFG | |
| | GLGHYFDYWGQGTTLTVSS | | GGTKLEIK | |
| SCT-Ga096 | DVQLQESGPALVKPSQTVSLTCTVTGYSITNGN | 82 | DVVMTQTPLTLSVTFGQPASISCKSSQSLLDSD | 432 |
| | HWWNWIRQVSGSKLEWIGYITSSGRTDSNPSLK | | GKTYLNWLLQRPGQSPKRLIYLVSKLDSGVPDR | |
| | SRISITRDTSKNQLFLQLNSVTTEDIATYFCSR | | FTGSGSGTDFTLKISRVEAEDLGVYYCWQGTHF | |
| | EGGWFPPVWGTGTTVTVSS | | PYTFGGGTKLEIK | |
| SCT-Ga097 | DVQLQESGPALVKPSQTVSLTCTVTGYSITNGN | 83 | DVVMTQTPLTLSVTIGQPASISCKSSQSLLDSD | 381 |
| | HWWNWIRQVSGGKLEWIGYIRSSGSTDYNPSLK | | GKTYLNWLLQRPGQSPKRLIYLVSKLDSGVPDR | |
| | SRISITRDISKNELFLQLNSVTTEDIATYYCTR | | FTGSGSGTDFTLKISRVEAEDLGVYYCWQGTHF | |
| | EGGWLPPVWGTGTTVTVSS | | PYTFGGGTKLEIK | |
| SCT-Ga098 | DVQLQESGPALVKPSQTVSLTCTVTGYSITNGN | 84 | DVVMTQTPLTLSVTIGQPASISCKSSQSLLDSD | 381 |
| | HWWNWIRQVSGSKLEWIGYITSSGRTDSNPSLK | | GKTYLNWLLQRPGQSPKRLIYLVSKLDSGVPDR | |
| | SRISITRDTSKNQLFLQLNSVTTEDIATYYCTR | | FTGSGSGTDFTLKTSRVEAEDLGVYYCWQGTHF | |
| | EGGWLPPVWGTGTTVTVSS | | PYTFGGGTKLEIK | |
| SCT-Ga099 | QVQLQQPGTELVKPGTSVKLSCKASGYTFTSYW | 85 | DIQMNQSPSSLSASLGDTITITCHASQNINVWL | 433 |
| | MHWVKQRPGQGLEWIGNINPSNGGTNYNEKFMR | | SWYQHKSGNIPKLLIYQASNLHTGVPSRFSGSG | |
| | KATLTVDKSSSTAYMQLSSLTSEDSAVYYCARR | | SGTGFTLTISSLQPEDIATYYCQQGQSYPLTFG | |
| | TTVLAGPYFDYWGQGTTLTVSS | | SGTKLEIK | |
| SCT-Ga100 | EVMLVESGGGLVKPGGSLKLSCAASGFTFSSYT | 79 | DIQMNQSPSSLSASLGDTITITCHASQNINVWL | 434 |
| | MSWVRQTPEKRLEWVATISGGGGNTYYPDSVKG | | NWYQQKPGNIPKLLIYKASNLHTGVPSRFSGSG | |
| | RFTISRDNAKNTLYLQMSSLRSEDTALYYCARW | | SGTGFTLTISSLQPEDIATYYCQQGQSYPYTFG | |
| | LLTYYAMDYWGQGTSVTVSS | | GGTKLEIK | |
| SCT-Ga101 | EVQLVESGGDLVKPGGSLKLSCAASGFTFSSYG | 86 | NIMMTQSPSSLAVSAGEKVTMSCKSSQSVLYSS | 435 |
| | MSWVRQTPDKRLEWVATISSGGSYTYYPDSVKG | | NQKNYLAWYQQKPGQSPKLLIYWASTRESGVPD | |
| | RFTISRDNAKNTLYLQMSSLQSEDTAMYYCARH | | RFTGSGSGTDFTLTISSVQAEDLAVYYCHQYLS | |
| | HYYYGSSYIFYFDVWGTGTTVTVSS | | SLTFGAGTKLELK | |
| SCT-Ga102 | EVMMVESGGGLVKPGGSLKLSCAASGFTFSSYT | 87 | DIQMNQSPSSLSASLGDTITITCHASQNINVWL | 436 |
| | MSWVRQTPEKRLEWVATISGRGGNTYYPDSVKG | | SWYQQKPGNIPKLLIYKASTLHTGVPSRFSGSG | |
| | RFTISRDNAKSTLYLQMSSLRSEDTAMYYCARW | | SGSGFTLTISSLQPEDIATYYCQQGQSYPYTFG | |
| | LLTYYAMDYWGQGTSVTVSS | | GGTKLEIK | |
| SCT-Ga103 | EVMMVESGGGLVRPGGSLKLSCAASGFTFSSYT | 88 | DIQMNQSPSSLSASLGDTITITCHASQNINIWL | 437 |
| | MSWIRQTPEKRLEWVATISGRGGNTYYPDSVKG | | SWYQQKPGNIPKLLIYKASNLHTGVPSRFSGSG | |
| | RITISRDNAKNTLYLQMSSLRSEDTAMYYCVRW | | SGTGFTLTISSLQPEDIATYYCQQGQSYPYTFG | |
| | LLTYYAMDYWGHGTSVTVSS | | GGTKLEIK | |
| SCT-Ga104 | EVMLVESGGGLVKPGGSLKLSCAASGFTFSSYT | 89 | DIQMNQSPSSLSASLGDTITITCHASQNINVWL | 438 |
| | MSWVRQTPEKRLEWAATISGGGGNTYYPDSVKG | | NWYQQKPGNTPKLLIYKASKLHTGVPSRFSGSG | |
| | RFTISRDNAKNTLYLQMSSLRSEDTALYYCARW | | SGTGFTLTISSLQPEDIATYSCQQGQSYPYTFG | |
| | LPTYYAMDYWGQGTSVTVSS | | GGTKLEIN | |
| SCT-Ga105 | QIQLVQSGPELKKPGETVKISCKASGYSFTTYG | 90 | DVVMTQTPLSLPVSLGDQASISCRSSQSLVHSN | 439 |
| | MNWVKQAPGKGLKWMGWINTYSGVPTYDDDFKG | | GNTYLHWYLQKPGQSPKLLIYKISNRFSGVPDR | |
| | RFAFSLETSASTAYLQINNLKNEDTATYFCARY | | FSGSGSGTDFTLKISRVEAEDLGVYFCSQSTHV | |
| | DYDVGFAYWGPGTLVTVSA | | PAFGGGTKLEIK | |
| SCT-Ga106 | DVQLQASGPALVKPSQTVSLTCTVTGYSITHGN | 91 | DVVMTQTPLTLSITIGQPASISCKSSQSLLDSD | 440 |
| | HWWNWIRQVSGSKLEWIGYISSSGRIDTNPSLK | | GKTYLNWLLQRPGQSPKRLIYLVSKLDSGVPDR | |
| | SPISITRDTSKNKFFLQLNSVTTEDIATYYCAR | | FTGSGSGTDFTLKISRVEAEDLGVYYCWQGTHF | |
| | EGGWLPPVWGTGTTVTVSS | | PYTFGGGTKLEIK | |
| SCT-Ga107 | DVQLQESGPALVKPSQTVSLTCTVTGYSITNGN | 92 | DVVMTQTPLTLSVTIGQPASISCKSSQSLLDSD | 381 |
| | HWWNWIRQVSGSKLEWIGYITSSGRTDSNPSLQ | | GKTYLNWLLQRPGQSPKRLIYLVSKLDSGVPDR | |
| | SRISITRDTSKNQLFLQLNSVTTEDIATYYCTR | | FTGSGSGTDFTLKISRVEAEDLGVYYCWQGTHF | |
| | EGGWLPPVWGTGTTVTVSS | | PYTFGGGTKLEIK | |
| SCT-Ga108 | DVQLQESGPALVKPSQTVSLTCTVTGYSITNGN | 93 | DVVMTQTPLTLSVTIGQPASISCKSSQSLLDSD | 381 |
| | HWWNWIRQVSGRKLEWIGYITSSGRIDSNPSLK | | GKTYLNWLLQRPGQSPKRLIYLVSKLDSGVPDR | |
| | SRISITRDTSKNQLFLQLNSVTSEDLGTYYCAR | | FTGSGSGTDFTLKISRVEAEDLGVYYCWQGTHF | |
| | EGGWLPPVWGTGTTVTVSS | | PYTFGGGTKLEIK | |
| SCT-Ga109 | DVQLQVSGPALVKPSQTVSLTCTVTGYSITNGN | 94 | DVVMTQTPLTLSVTIGQPASISCKSSQSLLDSD | 381 |
| | HWWNWIRQVSGSKLEWIGYISSSGRTDSNPSLQ | | GKTYLNWLLQRPGQSPKRLIYLVSKLDSGVPDR | |
| | SRISITRDTSKNQLFLQLNSVTTEDIGTYYCAR | | FTGSGSGTDFTLKISRVEAEDLGVYYCWQGTHF | |
| | EGGWLPPVWGTGTTVTVSS | | PYTFGGGTKLEIK | |
| SCT-Ga110 | DVQLQESGPALVKPSQTVSLTCTVTGYSITNGN | 62 | DVVVTQTPLTLSVTIGQSASISCKSSQSLLDSD | 441 |
| | HWWNWVRQVSGRKLEWIGYITSSGRTDSNPSLK | | GKTYLNWLLQRPGQSPKRLIYLVSKLDSGVPDR | |
| | SRISITRDTSKNQLFLQLNSVTTEDIATYYCAR | | FTGSGSGTDFTLKISRVEAEDLGVYYCWQGTHF | |
| | EGGWLPPVWGTGTTVTVSS | | PYTFGGGTKLEIK | |
| SCT-Ga111 | DVQLQESGPALVKPSQTVSLTCTVTGYSITNGN | 95 | DVVMTQTPLTLSVTIGQPASISCKSSQSLLDSD | 398 |
| | HWWNWIRQVSGSKLEWIGYITSSGRTDSNPSLR | | GKTYLNWLLQRPGQSPKRLIYLVSKLDSGVPDR | |
| | SRISITRDISKNKLFLQMNSVTNEEIATYYCAR | | FTGSGSGTDFTLKISRVEAEDLGLYYCWQGTHF | |
| | EGGWLPPVWGTGTTVTVSS | | PYTFGGGTKLEIK | |
| SCT-Ga112 | QVQLQQSGAELVRPGTSVKVSCKASGYAFTNYL | 96 | DIVLTQSPSSLSVAAGEKVTLSCKSSQSLLNSG | 442 |
| | IEWVKQRPGQGLEWIGVINPGSGGSNYSEKFKG | | IQKNYLAWYQQKPGQPPKLLIYGASTRESGVPD | |
| | KTTLTADRSSSTAYMQLSSLTSEDSAVYFCART | | RFTGSGSGTDFTLTISSVQVEDLAVYYCQNDHR | |
| | GVYGNFLIFDYWGQGTTLTVSS | | YPFTFGGGTKLEIK | |
| SCT-Ga113 | DVQLQESGPALVKPSQTVSLTCTVTGYSITNGN | 84 | DVVMTQTPLTLSVTIGQPASMSCKSSQSLLDSD | 443 |
| | HWWNWIRQVSGSKLEWIGYITSSGRTDSNPSLK | | GKTYLNWLLQRPGQSPKRLIYLVSKLDSGVPDR | |
| | SRISITRDTSKNQLFLQLNSVTTEDIATYYCTR | | FTGSGSGTDFTLKISRVEAEDLGLYYCWQGTHF | |
| | EGGWLPPVWGTGTTVTVSS | | PYTFGGGTKLEIK | |
| SCT-Ga114 | DVQLQESGPALVKPSQTVSLTCTVTGYSITNGN | 97 | DVVMTQTPLTLSVTIGQPASISCKSSQSLLDSD | 381 |
| | HWWNWIRQVSGGKLEWIGYITSSGRTDSNPSLK | | GKTYLNWLLQRPGQSPKRLIYLVSKLDSGVPDR | |
| | SRISITRDTSKNHLFLQLNSVNTDDVGTYYCAR | | FTGSGSGTDFTLKTSRVEAEDLGVYYCWQGTHF | |
| | EGGWLPPVWGTGTTVTVSS | | PYTFGGGTKLEIK | |
| SCT-Ga115 | DVQLQESGPALVKPSQTVSLTCTVTGYSITNGN | 98 | DVVMTQTPLTLSVTIGQPASISCKSSQSLLDSD | 444 |
| | HWWNWIRQVSGSKLEWIGYITSSGRTDSNPSLK | | GKTYLNWLFQRPGHSPKRLIYLVSKLDSGVPNR | |
| | SRISITRDTSRNQLFLQLNSVITEDVATYFCAR | | FTGSGSGTDFTLKISRVEAEDLGVYYCWQGTHF | |
| | EGGWLPPVWGTGTTVTVSS | | PYTFGGGTKLEIK | |
| SCT-Ga116 | DVQLQESGPALVKPSQTVSLTCTVTGYSITNGN | 99 | DVVMTQTPLTLSVTIGQPASISCKSSQSLLDSD | 381 |
| | HWWNWIRQVSGSKLEWIGYITSSGRTDSNPSLK | | GKTYLNWLLQRPGQSPKRLIYLVSKLDSGVPDR | |
| | SRISITRDTSKNQLFLQLDSVTTEEIATYYCAR | | FTGSGSGTDFTLKISRVEAEDLGVYYCWQGTHF | |
| | EGGWLPPVWGTGTTVTVSS | | PYTFGGGTKLEIK | |
| SCT-Ga117 | DVQLQASGPALVKPSQTVSLTCTVTGYSITNGN | 100 | DVVMTQTPLTLSVTIGQPASISCKSSQSLLDSD | 381 |
| | HWWNWIRQVSGGKLEWIGYIRSSGSTDTNPSLK | | GKTYLNWLLQRPGQSPKRLIYLVSKLDSGVPDR | |
| | SRISITRDISKNELFLQLNSVTTEDIATYYCTR | | FTGSGSGTDFTLKISRVEAEDLGVYYCWQGTHF | |
| | EGGWLPPVWGTGTTVTVSS | | PYTFGGGTKLEIK | |
| SCT-Ga118 | DVQLQESGPALVKPSQTVSLTCTVTGYSITNGN | 7 | DVVMTQTPLTLSVTIGQPASISCKSSQSLLDSD | 381 |
| | HWWNWIRQVSGSKLEWIGYITSSGRTDSNPSLK | | GKTYLNWLLQRPGQSPKRLIYLVSKLDSGVPDR | |
| | SRISITRDTSKNQLFLQLNSVITEDIATYYCAR | | FTGSGSGTDFTLKISRVEAEDLGVYYCWQGTHF | |
| | EGGWLPPVWGTGTTVTVSS | | PYTFGGGTKLEIK | |
| SCT-Ga119 | DVQLQESGPALVKPSQTVSLTCTVTGYSITNGN | 101 | DVVMTQTPLTLSVTIGQPASISCKSSQSLLDSD | 381 |
| | HWWNWIRQVSGSKLEWIGYIRSSGRTDSNPSLK | | GKTYLNWLLQRPGQSPKRLIYLVSKLDSGVPDR | |
| | SRISITRDTSKNQLFLQLNSVTTEDIATYYCTR | | FTGSGSGTDFTLKISRVEAEDLGVYYCWQGTHF | |
| | EGGWLPPVWGTGTTVTVSS | | PYTFGGGTKLEIK | |
| SCT-Ga120 | DVQLQESGPALVKPSQTVSLTCTVTGYSITNGN | 102 | DVVMTQTPLTLSVTIGQPASISCKSSQSLLDSD | 445 |
| | HWWNWIRQVSGRKLEWIGYITSSGRTDSNPSLR | | GKTYLNWLLQRPGQSPKRLIYLVSKLDSGVPDR | |
| | SRISITRDTSKNQLFLQLNSVTTENIATYYCAR | | FTGSGSGTDFTLKISRVEADDLGVYYCWQGTHF | |
| | EGGWLPPVWGTGTTVTVSS | | PYTFGGGTKLEIK | |
| SCT-Ga121 | DVQLQESGPALVKPSQTVSLTCTVTGYSITNGN | 27 | DVVMTQTPLTLSVTIGQPASISCKSSQSLLDGD | 446 |
| | HWWNWIRQVSGGKLEWIGYIRSSGSTDSNPSLK | | GRTYLNWLLQRPGQSPKRLIYLVSKLDSGVPDR | |
| | SRISITRDISKNELFLQLNSVTTEDIATYYCTR | | FTGSGSGTDFTLKISRVEAEDLGVYYCWQGTHF | |
| | EGGWLPPVWGTGTTVTVSS | | PYTFGGGTKLEIK | |
| SCT-Ga122 | DVQLQESGPALVKPSQTVSLTCTVTGYSITNGN | 103 | DVVMTQTPLTLSVIIGQPASISCRSSQSLLDSD | 447 |
| | HWWNWVRQVSGSKLEWIGYITSSGRIDNNPSLK | | GKTYLNWLLQRPGQSPKRLIYLVSKLDSGVPDR | |
| | SRISITRDTSKNQLFLQLNSVTTEDIATYYCAR | | FTGSGSGTDFTLKISRVEAEDLGVYYCWQGTHF | |
| | EGGWLPPVWGTGTTVTVSS | | PYTFGGGTTLEIK | |
| SCT-Ga123 | DVQLQESGPALVKPSQTVSLTCTVTGYSITNGN | 84 | DVVMTQTPLTLSVTIGQPASISCKSSQSLLDSD | 385 |
| | HWWNWIRQVSGSKLEWIGYITSSGRTDSNPSLK | | GKTYLNWLLQRPGQSPKRLIYLVSKLDSGVPNR | |
| | SRISITRDTSKNQLFLQLNSVTTEDIATYYCTR | | FTGSGSGTDFTLKISRVEAEDLGVYYCWQGTHF | |
| | EGGWLPPVWGTGTTVTVSS | | PYTFGGGTKLEIK | |
| SCT-Ga124 | DVQLQESGPALVKPSQTVSLTCTVTGYSITNGN | 104 | DVVMTQTPLTLSVAIGQPASISCKSSQSLLDSD | 382 |
| | HWWNWIRQVSGGKLEWIGYIRSSGSTDINPSLK | | GKTYLNWLLQRPGQSPKRLIYLVSKLDSGVPNR | |
| | SRISITRDISKNEFFLQLNSVTTEDIATYYCSR | | FTGSGSGTDFTLKISRVEAEDLGVYYCWQGTHF | |
| | EGGWLPPVWGTGTTVTVSS | | PYTFGGGTKLEIK | |
| SCT-Ga125 | DVQLQESGPALVKPSQTVSLTCTVTGYSITNGN | 7 | DVVMTQTPLTLSVAIGQPASISCKSSQSLLDSD | 448 |
| | HWWNWIRQVSGSKLEWIGYITSSGRTDSNPSLK | | GKTYLNWLLQRPGQSPKRLIYLVSKLDSGVPKR | |
| | SRISITRDTSKNQLFLQLNSVITEDIATYYCAR | | FTGSGSGTDFTLKISRVEAEDLGVYYCWQGTHF | |
| | EGGWLPPVWGTGTTVTVSS | | PYTFGGGTKLEIK | |
| SCT-Ga126 | DVQLQESGPALVKPSQTVSLTCTVTGYSITNGN | 105 | DVVMTQTPLTLSATIGESASIYCKSSQSLLDSD | 404 |
| | HWWNWIRQVSGSKLEWIGYIRSSGRTDSNPSLE | | GKTYLNWLLQRPGQSPKRLIYLVSKLDSGVPDR | |
| | SRISITRDTSKNQIFLQLNSVTTEDIATYYCTR | | FTGSGSGTDFTLKISRVEAEDLGVYYCWQGTHF | |
| | EGGRLPPVWGTGTTVTVSS | | PYTFGGGTKLEIK | |
| SCT-Ga127 | DVQLQESGPALVKPSQTVSLTCTVTGYSITNGN | 106 | DVVMTQTPLTLSVTIGQPASISCKSSQSLLDSD | 410 |
| | HWWNWIRQVSGSKLEWIGYITSSGRTDSNPSLK | | GKTYLNWLLQRPGQSPKRLIYLVSKLDSGVPDR | |
| | SRISITRDTSKNQLFLQLNSVTTEDIGTYYCAR | | FTGSGSGTDFTLKISRVEAEDLGVYYCWQGTHF | |
| | EGGWFPPVWGTGTTVTVSS | | PYTFGGGTKLEIQ | |
| SCT-Ga128 | DVQLQVSGPALVKPSQTVSLTCTVTGYSITNGN | 107 | DVVMTQTPLTLSVTIGQPASISCKSSQSLLDSD | 381 |
| | HWWNWIRQVSGSKLEWIGYITSSGRTDSNPSLK | | GKTYLNWLLQRPGQSPKRLIYLVSKLDSGVPDR | |
| | SRISITRDTSKNQLFLQLNSVTTEDIATYYCAR | | FTGSGSGTDFTLKISRVEAEDLGVYYCWQGTHF | |
| | EGGWLPPVWGTGSTVTVSS | | PYTFGGGTKLEIK | |
| SCT-Ga129 | DVQLQESGPALVKPSQTVSLTCTVTGYSITTGN | 108 | DVVMTQTPLTLSVTIGQPASISCKSSQSLLDSD | 381 |
| | HWWNWIRQVSGGKLEWIGYIRSSGSTDSNPSLE | | GKTYLNWLLQRPGQSPKRLIYLVSKLDSGVPDR | |
| | SRISITRDISKNELFLQLNSVTTADMGTYYCTR | | FTGSGSGTDFTLKISRVEAEDLGVYYCWQGTHF | |
| | EGGLFPPVWGTGTTVTVSS | | PYTFGGGTKLEIK | |
| SCT-Ga130 | DVQLQASGPALVKPSQTVSLTCTVTGYSITNGN | 109 | DVVMTQTPLTLSVTIGQPASISCKSSQSLLDSD | 381 |
| | HWWNWIRQVSGSKLEWIGYITSNGRTDSNPSLK | | GKTYLNWLLQRPGQSPKRLIYLVSKLDSGVPDR | |
| | SRISITRDTSKNKLFLQLNSVTHEDIATYYCAR | | FTGSGSGTDFTLKTSRVEAEDLGVYYCWQGTHF | |
| | EGGWLPPVWGTGTTVTVSS | | PYTFGGGTKLEIK | |
| SCT-Ga131 | EVMLVESGGGLVKPGGSLKLSCAASGFTFSRYI | 110 | DIQMTQSPSSLSASLGERVSLTCRASQDIGSSL | 449 |
| | MSWVRQTPEKRLEWVATITGGGGNTYYPDSVKG | | NWLHQGPDGTIKRLIYATYSLDSSVPKRFSGSR | |
| | RFTISRDNARNTLYLQMSSLSSEDTALFYCARW | | SGSDYSLTISSLESEDFVDYCCLLYVNSPWTFG | |
| | LPTYYAMDYWGQGTSVTVSS | | GGTKLEIK | |
| SCT-Ga132 | DVQLQESGPALVKPSQTVSLTCTVTGYSITNGN | 111 | DVVMTQTPLTLSVTIGQPASISCKSSQSLLDSD | 450 |
| | HWWNWIRQVSGSKLEWIGYITSSGRTDSNPSLR | | GRTYLNWLLKRPGQSPKRLIYLVSKLDSGVPDR | |
| | SRISITRDTSKNQLFLQLNSVTTEEIATYYCAR | | FTGSGSGTDFTLKISRVEAEDLGVYYCWQGTHF | |
| | EGGWLPPVWGTGTTVTVSS | | PYTFGGGTKLEIK | |
| SCT-Ga133 | DVQLQESGPALVKPSQTVSLTCTVTGYSITNGN | 27 | DVVMTQTPLTLSVTIGQPASISCKSSQSLLDSD | 451 |
| | HWWNWIRQVSGGKLEWIGYIRSSGSTDSNPSLK | | GKTYLNWLLQRPGQSPKRLIYLVSKLDSGVPDR | |
| | SRISITRDISKNELFLQLNSVTTEDIATYYCTR | | FTGSGSGTDFTLKISRVEAEDLGVYYCWQGTHF | |
| | EGGWLPPVWGTGTTVTVSS | | PYTFGGGTKLERK | |
| SCT-Ga134 | QVQLQQSGPELVRPGASVTISCKASGYTFTDYY | 112 | DIQMNQSPSSLSASLGDTITITCHASQNINVWL | 452 |
| | INWVKQRPGQGLEWIGWIFPGSDNTYYNAKFKG | | SWYQQKPGNIPKLLIYTTSILHTGVPSRFSGSG | |
| | KATLTVDISSSTAYMLLSSLTSEDSAVYFCARY | | SGTGFALTISSLQPEDIATYYCQQGQSYPLTFG | |
| | GLGHYFDYWGQGTTLTVSS | | GGTKLEIK | |
| SCT-Ga135 | DIQLQESGPALVKPSQTVSLTCTVTGYSITNGN | 113 | DVVMTQTPLTLSVTIGQPASISCKSSQSLLDSD | 385 |
| | HWWNWIRQVSGSKLEWIGYITSSGRTDSNPSLK | | GKTYLNWLLQRPGQSPKRLIYLVSKLDSGVPNR | |
| | SRISITRDTSKNQLFLQLNSVITEDIATYYCAR | | FTGSGSGTDFTLKISRVEAEDLGVYYCWQGTHF | |
| | EGGWLPPVWGTGTTVTVSS | | PYTFGGGTKLEIK | |
| SCT-Ga136 | QVQLQQPGAELVKPGASVKMSCKASGYTFTSYW | 114 | DIVMTQSHKFMSTSVGDRVYITCKASQDVFTAV | 453 |
| | ITWVKQRPGQGLEWIGDFYPGGGSTNYNEKFKS | | AWFQQKPGQSPKLLIYSASYRYTGVPDRFTGSG | |
| | KATLTVDTSSNTAYMQLSSLTSEDSAVYYCARS | | SGTDFTFTISSVQAEDLAVYYCQQHYNTPLTFG | |
| | YSNYVRFAYWGQGTLVTVSA | | AGTKLELK | |
| SCT-Ga137 | QVQLQQSGPELVKPGASVKISCKASGHTFTDYY | 115 | EIVLTQSPALMAASPGEKVTITCSVSSSISSSN | 454 |
| | INWVKQRPGQGLEWIGWIFPGSGNTYFNEKFKG | | LHWYQQKSETSPKPWIYGTSNLASGVPIRFSGS | |
| | KATLTVDKSSSTVYMLLSSLTSEDSAVYFCAGY | | GSGTSYSLTISSMEAEDAATYYCQQWSSYPLTF | |
| | GLGHYFDNWGQGTTLTVSS | | GGGTKLEIK | |
| SCT-Ga138 | DVQLQESGPALVKPSQTVSLTCTVTGYSITNGN | 116 | DVVMTQTPLTLSVTIGQPASISCKSSQSLLDSD | 381 |
| | HWWNWIRQVSGSKLEWIGYIRSSGSTDSNPSLK | | GKTYLNWLLQRPGQSPKRLIYLVSKLDSGVPDR | |
| | SRISITRDTSKNQLFLQLNSVTTEDIATYYCTR | | FTGSGSGTDFTLKISRVEAEDLGVYYCWQGTHF | |
| | EGGWLPPVWGTGTTVTVSS | | PYTFGGGTKLEIK | |
| SCT-Ga139 | DVHLQESGPALVKPSQTVSLTCTVTGYSITNGN | 117 | DVVMTQTPLTLSVTIGQPASISCKSSQSLLDSD | 385 |
| | HWWNWIRQVSGSKLEWIGYITSSGRTDSNPSLK | | GKTYLNWLLQRPGQSPKRLIYLVSKLDSGVPNR | |
| | SRISITRDTSKNQLFLQLNSMTTEDIATYYCAR | | FTGSGSGTDFTLKISRVEAEDLGVYYCWQGTHF | |
| | EGGWLPPVWGTGTTVTVSS | | PYTFGGGTKLEIK | |
| SCT-Ga140 | DVQLQESGPALVKPSQTVSLTCTVTGYSITNGN | 17 | DVVMTQTPLTLSVTIGQPASISCRSSQSLLDSD | 455 |
| | HWWNWIRQVSGSKLEWIGYITSSGRTDSNPSLQ | | GKTYLNWLLQRPGQSPKRLIYLVSKLDSGVPDR | |
| | SRISITRDTSKNQLFLQLNSVTTEDIATYYCAR | | FTGSGSGTDFTLNISRVEAEDLGVYYCWQGTHF | |
| | EGGWLPPVWGTGTTVTVSS | | PYTFGGGTKLEIK | |
| SCT-Ga141 | DVQLQESGPALVKPSQTVSLTCTVTGYSITNGN | 23 | DVVMTQTPLTLSVTIGQPASISCKSSQSLLDSD | 456 |
| | HWWNWIRQVSGGKLEWIGYIRSSGSTDFNPSLK | | GRTYLNWLLQRPGQSPKRLIYLVSKLDSGVPDR | |
| | SRISITRDISKNELFLQLNSVTTEDIATYYCTR | | FTGSGSGTDFTLKISRVEAEDLGVYYCWQGTHF | |
| | EGGWLPPVWGTGTTVTVSS | | PYTFGGGTKLEIK | |
| SCT-Ga142 | DVQLQESGPALVKPSQTVSLTCTVTGYSITNGK | 118 | DVVMTQTPLTLSVTIGQPASISCKSSQSLLDSD | 456 |
| | HWWNWIRQVSGGKLEWIGYIRSSGSTDFNPSLK | | GRTYLNWLLQRPGQSPKRLIYLVSKLDSGVPDR | |
| | SRISITRDISKNELFLQLNSVTTEDIATYYCTR | | FTGSGSGTDFTLKISRVEAEDLGVYYCWQGTHF | |
| | EGGWLPPVWGTGTTVTVSS | | PYTFGGGTKLEIK | |
| SCT-Ga143 | DVQLQESGPALVKPSQTVSLTCTVTGYSITNGN | 119 | DVVMTQTPLTLSVTIGQPASISCKSSQSLLDSD | 398 |
| | HWWNWIRQVSGSKLEWIGYITSSGRTDSNPSLR | | GKTYLNWLLQRPGQSPKRLIYLVSKLDSGVPDR | |
| | SRFSITRDTSKNKLFLQLNSVTNEDIATYYCAR | | FTGSGSGTDFTLKISRVEAEDLGLYYCWQGTHF | |
| | EGGWLPPVWGTGTTVTVSS | | PYTFGGGTKLEIK | |
| SCT-Ga144 | DIQLQESGPALVKPSQTVSLTCTVTGYSITNGN | 120 | DVVMTQTPLTLSVTIGQPASISCKSSQSLLDSD | 381 |
| | HWWNWIRQVSGSKLEWIGYISSSGRTDRNPSLK | | GKTYLNWLLQRPGQSPKRLIYLVSKLDSGVPDR | |
| | SRISITRDTSKNQVFLQLNSVTTEDIATYYCAR | | FTGSGSGTDFTLKISRVEAEDLGVYYCWQGTHF | |
| | EGGWLPPVWGTGTTVTVSS | | PYTFGGGTKLEIK | |
| SCT-Ga145 | DVQLQVSGPALVKPSQTVSLTCTVTGYSITNGN | 121 | DVVMTQTPLTLSVTIGQPASISCKSSQSLLDSD | 381 |
| | HWWNWIRQVSGSKLEWIGYISSSGRTDSNPSLK | | GKTYLNWLLQRPGQSPKRLIYLVSKLDSGVPDR | |
| | SRISITRDTSKNQLFLQLNSVTTEDTVTYYCAR | | FTGSGSGTDFTLKISRVEAEDLGVYYCWQGTHF | |
| | EGGWLPPVWGTGTTVTVSS | | PYTFGGGTKLEIK | |
| SCT-Ga146 | DVQLQESGPALVKPSQTVSLTCTVTGYSITNGN | 84 | DVVMTQTALTLSVTIGQPASISCKSSQSLLDSD | 457 |
| | HWWNWIRQVSGSKLEWIGYITSSGRTDSNPSLK | | GKTYLNWLLQRPGQSPKRLIYLVSKLDSGVPDR | |
| | SRISITRDTSKNQLFLQLNSVTTEDIATYYCTR | | FTGSGSGTVFTLKTSRVEAEDLGVYYCWQGTHF | |
| | EGGWLPPVWGTGTTVTVSS | | PYTFGGGTKLEIK | |
| SCT-Ga147 | DVQLQESGPALVKPSQTVSLTCTVTGYSITNGN | 122 | DVVMTQTPLTLSVTIGQPASISCKSSQSLLDGD | 458 |
| | HWWNWIRQVSGSKLEWIGYITSSGRTDSNPSLS | | GKTYLNWLLQRPGQSPKRLIYLVSKLDSGVPDR | |
| | SRVSITRDTSKNQLFLQLNSVTTEDIATYYCTR | | FTGSGSGTDFTLKISRLEAEDLGVYYCWQGTHF | |
| | EGGWLPPVWGPGTTVTVSS | | PYTFGGGTKLEIK | |
| SCT-Ga148 | DVQLQESGPALVKPSQTVSLTCTVTGYSITNGN | 123 | DVVMTQTPLTLSVTIGQPASIFCKSSQSLLDRD | 406 |
| | HWWNWIRQVSGGKLEWIGYIRSSGSTDINPSLK | | GKTYLNWLLQRPGQSPKRLIYLVSKLDSGVPDR | |
| | SRISITRDISKNELFLQLNSVTTEDIATYYCTR | | FTGSGSGTDFTLKISRVEAEDLGVYYCWQGTHF | |
| | EGGWLPPVWGTGTTVTVSS | | PYTFGGGTKLEIK | |
| SCT-Ga149 | DVQLQESGPALVKPSQTVSLTCTVTGYSITNGN | 93 | DVVMTQTPLTLSVTIGQPASISCKSSQSLLDSD | 451 |
| | HWWNWIRQVSGRKLEWIGYITSSGRIDSNPSLK | | GKTYLNWLLQRPGQSPKRLIYLVSKLDSGVPDR | |
| | SRISITRDTSKNQLFLQLNSVTSEDLGTYYCAR | | FTGSGSGTDFTLKISRVEAEDLGVYYCWQGTHF | |
| | EGGWLPPVWGTGTTVTVSS | | PYTFGGGTKLERK | |
| SCT-Ga150 | DVQLQESGPALVKPSQTVSLTCTVTGYSITNGN | 58 | DVVMTQTPLTLSVTIGQPASISCKSGQSLLDSD | 389 |
| | HWWNWIRQVSGNKLEWIGYISSSGRTDSNPSLK | | GKTYLNWLLQRPGQSPKRLIYLVSKLDSGVPDR | |
| | SRISITRDTSKNQLFLQLNSVTTEDIATYYCAR | | FTGSGSGTDFTLKISRVEAEDLGVYYCWQGTHF | |
| | EGGWLPPVWGTGTTVTVSS | | PYTFGGGTKLEIK | |
| SCT-Ga151 | DVQLQESGPALVKPSQTVSLTCTVTGYSITNGN | 124 | DVVMTQTPLTLSVTIGQPASISCKSSQSLLDSD | 381 |
| | HWWNWIRQVSGTKLEWIGYIRSSGGTDSNPSLK | | GKTYLNWLLQRPGQSPKRLIYLVSKLDSGVPDR | |
| | SRISITRDTSKNQLFLQLNSVTTEDIGTYYCSR | | FTGSGSGTDFTLKISRVEAEDLGVYYCWQGTHF | |
| | EGGWLPPVWGTGTTVTVSS | | PYTFGGGTKLEIK | |
| SCT-Ga152 | DVQLQESGPALVKPSQTVSLTCTVTGYSITNGN | 17 | DVVMTQTPLTLSVTIGQPASISCKSSQSLLDSD | 451 |
| | HWWNWIRQVSGSKLEWIGYITSSGRTDSNPSLQ | | GKTYLNWLLQRPGQSPKRLIYLVSKLDSGVPDR | |
| | SRISITRDTSKNQLFLQLNSVTTEDIATYYCAR | | FTGSGSGTDFTLKISRVEAEDLGVYYCWQGTHF | |
| | EGGWLPPVWGTGTTVTVSS | | PYTFGGGTKLERK | |
| SCT-Ga153 | DVQLQESGPALVKPSQTVSLTCTVTGYSITNGN | 125 | DVVMTQTPLTLSVTIGQPASISCKSSQSLLDSD | 381 |
| | HWWNWIRQVSGGKLEWIGYIRSSGSTDSNPSLK | | GKTYLNWLLQRPGQSPKRLIYLVSKLDSGVPDR | |
| | SRISITRDISKNEIFLQLNSVNDEDIATYYCTR | | FTGSGSGTDFTLKISRVEAEDLGVYYCWQGTHF | |
| | EGGWLPPVWGTGTTVTVSS | | PYTFGGGTKLEIK | |
| SCT-Ga154 | DVQLQESGPALVKPSQTVSLTCTVTGYSITNGN | 27 | DVVMTQTPLTLSVTIGQPASISCKSSQSLLDSD | 445 |
| | HWWNWIRQVSGGKLEWIGYIRSSGSTDSNPSLK | | GKTYLNWLLQRPGQSPKRLIYLVSKLDSGVPDR | |
| | SRISITRDISKNELFLQLNSVTTEDIATYYCTR | | FTGSGSGTDFTLKISRVEADDLGVYYCWQGTHF | |
| | EGGWLPPVWGTGTTVTVSS | | PYTFGGGTKLEIK | |
| SCT-Ga155 | DVQLQESGPALVKPSQTVSLTCTVTGYSITNGN | 126 | DVVMTQTPLTLSVTIGQPASISCKSSQSLLDSD | 381 |
| | HWWNWIRQVSGTNLEWIGYITSSGRTDSNPSLK | | GKTYLNWLLQRPGQSPKRLIYLVSKLDSGVPDR | |
| | SRISITRDTSKNQLFLQLNSVTTEDIATYYCSR | | FTGSGSGTDFTLKISRVEAEDLGVYYCWQGTHF | |
| | EGGWLPPVWGTGTTVTVSS | | PYTFGGGTKLEIK | |
| SCT-Ga156 | DVQLQESGPALVKPSQTVSLTCTVTGYSITNGH | 127 | DVVMTQTPLTLSVTLGQPASISCKSSQSLLDSD | 459 |
| | HWWNWIRQVSGSKLEWIGYITSSGRTDSNPSLK | | GKTYLNWLLQRPGQSPKRLIYLVSKLDSGVPDR | |
| | SRISITRDTSKNQLFLQLNSVTTEDIATYYCAR | | FTGSGSGTDFTLQISRVEAADLGVYYCWQGTHF | |
| | EGGWLPPVWGTGTTVTVSS | | PYTFGGGTKLEIK | |
| SCT-Ga157 | DVQLQESGPALVKPSQTVSLTCTVTGYSITNGN | 7 | DVVMTQTPLTLSVTIGQPASISCKSSQSLLDSD | 460 |
| | HWWNWIRQVSGSKLEWIGYITSSGRTDSNPSLK | | GKTYLNWLLQRPGQSPKRLIYLVSKLDSGVPNR | |
| | SRISITRDTSKNQLFLQLNSVITEDIATYYCAR | | FTGSGSGTEFTLKISRVEAEDLGVYYCWQGTHF | |
| | EGGWLPPVWGTGTTVTVSS | | PYTFGGGTKLEIK | |
| SCT-Ga158 | DVQLQESGPALVKPSQTVSLTCTVTGYSITNGN | 7 | DVVMTQTPLTLSVTIGQPASISCKSSQSLLDSD | 398 |
| | HWWNWIRQVSGSKLEWIGYITSSGRTDSNPSLK | | GKTYLNWLLQRPGQSPKRLIYLVSKLDSGVPDR | |
| | SRISITRDTSKNQLFLQLNSVITEDIATYYCAR | | FTGSGSGTDFTLKISRVEAEDLGLYYCWQGTHF | |
| | EGGWLPPVWGTGTTVTVSS | | PYTFGGGTKLEIK | |
| SCT-Ga159 | DVQLQASGPALVKPSQTVSLTCTVTDYSITNGN | 128 | DVVMTQTPLTLSVTIGQPASISCRSSQSLLDGD | 461 |
| | HWWNWVRQVSGSKLEWIGYISSSGRIDSNPSLK | | GKTYLNWLLQRPGQSPKRLIYLVSKLDSGVPDR | |
| | SRISITRDTSKNQLFLQLTSVTTEDIATYYCAR | | FTGSGSGTDFTLKISRVEAEDLGVYYCWQGTHF | |
| | EGGLLPPVWGTGTTVTVSS | | PYTFGGGTKLEIK | |
| SCT-Ga160 | DVQLQESGPALVKPSQTVSLTCTVTGYSITNGN | 129 | DVVMTQTPLTLSVTIGQPASISCKSSQSLLDSD | 381 |
| | HWWNWIRQVAGSKLEWIGYISSSGRIDSNPSLK | | GKTYLNWLLQRPGQSPKRLIYLVSKLDSGVPDR | |
| | SRISITRDTSKNQLFLQLNSVTTEDIGTYYCAR | | FTGSGSGTDFTLKISRVEAEDLGVYYCWQGTHF | |
| | EGGWLPPVWGTGTTVTVSS | | PYTFGGGTKLEIK | |
| SCT-Ga161 | DVQLQASGPALVKPYQTVSLTCTVTGYSITNGN | 130 | DVVMTQTPLTLSVTIGQPASISCKSSQSLLDSD | 462 |
| | HWWNWIRQVSGSKLEWIGYITSSGRTDSNPSLR | | GKTYLNWLLQRPGQSPKRLIYLVSKLDSGVPDR | |
| | SRISITRDTSKNQLFLQLNSVTTEDIATYYCTR | | FTGSGSGTDFTLKISRLEAEDLGVYYCWQGTHF | |
| | EGGWFPPVWGTGTTVTVSS | | PYTFGGGTKLEIK | |
| SCT-Ga162 | DVQLQESGPALVKPSQTVSLTCTVTGYSITNGN | 84 | DVVMTQTPLTLSVTIGQPASISCKSSQSLLDSD | 398 |
| | HWWNWIRQVSGSKLEWIGYITSSGRTDSNPSLK | | GKTYLNWLLQRPGQSPKRLIYLVSKLDSGVPDR | |
| | SRISITRDTSKNQLFLQLNSVTTEDIATYYCTR | | FTGSGSGTDFTLKTSRVEAEDLGLYYCWQGTHF | |
| | EGGWLPPVWGTGTTVTVSS | | PYTFGGGTKLEIK | |
| SCT-Ga163 | DVQLQESGPALVKPSQTVSLTCTVTGYSITNGN | 131 | DVVMTQTPLTLSVTIGQPASISCKSSQSLLDSD | 381 |
| | HWWNWIRQVSGSKLEWIGYITSSGRTDSNPSLK | | GKTYLNWLLQRPGQSPKRLIYLVSKLDSGVPDR | |
| | SRISITRDTSKNQLFLQLNSVTTDDVATYYCAR | | FTGSGSGTDFTLKISRVEAEDLGVYYCWQGTHF | |
| | EGGWLPPVWGTGTTVTVSS | | PYTFGGGTKLEIK | |
| SCT-Ga164 | DVQLQESGPALVKPSQTVSLTCTVTGYSITNGN | 132 | DVVMTQTPLTLSVTIGQPASISCKSSQSLLDSD | 381 |
| | HWWNWIRQVSGGKLEWIGYIRSSGSTDSNPSLK | | GKTYLNWLLQRPGQSPKRLIYLVSKLDSGVPDR | |
| | SRISITRDISKNELFLQLNSVTIEDTATYYCTR | | FTGSGSGTDFTLKISRVEAEDLGVYYCWQGTHF | |
| | EGGWLPPVWGTGTTVTVSS | | PYTFGGGTKLEIK | |
| SCT-Ga165 | DVQLQESGPALVKPSQTVSLTCTVTGYSITNGN | 133 | DVVMTQTPLTLSVTIGQPASISCKSSQSLLDSD | 381 |
| | HWWNWIRQVSGTKLEWIGYIRSSGSTDSNPSLK | | GKTYLNWLLQRPGQSPKRLIYLVSKLDSGVPDR | |
| | SRISITRDTSKNQLFLQLNSVTTEDIATYYCAR | | FTGSGSGTDFTLKISRVEAEDLGVYYCWQGTHF | |
| | EGGWLPPVWGTGTTVTVSS | | PYTFGGGTKLEIK | |
| SCT-Ga166 | DVQLQASGPALVKPSQTVSLTCTVTGYSITNGN | 67 | DVVMTQTPLTLSVAIGQPASISCKSSQSLLDSD | 382 |
| | HWWNWIRQVSGSKLEWIGYITSSGRTDSNPSLK | | GKTYLNWLLQRPGQSPKRLIYLVSKLDSGVPNR | |
| | SRISITRDTSKNQLFLQLNSVITEDIATYYCAR | | FTGSGSGTDFTLKISRVEAEDLGVYYCWQGTHF | |
| | EGGWLPPVWGTGTTVTVSS | | PYTFGGGTKLEIK | |
| SCT-Ga167 | QIELVQSGPELKKPGETVKISCKASGYTFTTYG | 134 | DVVMTQTPLSLPVSLGDQASISCRSSQSLVHSN | 396 |
| | MNWVKQAPGKGLKWMGWINTYSGVPTYADDFKG | | GNTYLHWYLQKPGQSPKLLIYKVSNRFSGVPDR | |
| | RFAFSLETSASTAYLQINNLKNEDTATYFCARY | | FSGSGSGTDFTLKISRVEAEDLGVYFCSQSTHV | |
| | DYDVGFAYWGQGTLVTVSA | | PTFGGGTKLEIK | |
| SCT-Ga168 | DVQLQASGPALVKPYQTVSLTCTVTGYSITNGN | 51 | DVVMTQTPLTLSVTIGQPASISCKSSQSLLDSD | 381 |
| | HWWMWTRQVSGSKLEWIGYIRSSGSTDSNPSLK | | GKTYLNWLLQRPGQSPKRLIYLVSKLDSGVPDR | |
| | SRISITRDTSKNQLFLQLNSVTTEDIATYYCAR | | FTGSGSGTDFTLKISRVEAEDLGVYYCWQGTHF | |
| | EGGWLPPVWGTGTTVTVSS | | PYTFGGGTKLEIK | |
| SCT-Ga169 | DVQLQASGPALVKPYQTVSLTCTVTGYSITNGN | 51 | DVVMTQTPFTLSVTIGQPASISCKSSQSLLDSD | 463 |
| | HWWNWIRQVSGSKLEWIGYIRSSGSTDSNPSLK | | GKTYLNWLLQRPGQSPKRLIYLVSKLDSGVPDR | |
| | SRISITRDTSKNQLFLQLNSVTTEDIATYYCAR | | FTGSGSGTDFTLKISRVEAEDLGVYYCWQGTHF | |
| | EGGWLPPVWGTGTTVTVSS | | PYTFGGGTKLEIK | |
| SCT-Ga170 | DVQLQESGPALVKPSQTVSLTCTVTGYSITNGN | 135 | DVVMTQTPLTLSVTIGQPASISCKSSQSLLDSD | 381 |
| | HWWNWIRQVSGGKLEWIGYIRSSGSTDSNPSLK | | GKTYLNWLLQRPGQSPKRLIYLVSKLDSGVPDR | |
| | SRISITRDIYKNELFLQLNSVNTEDTATYYCTR | | FTGSGSGTDFTLKISRVEAEDLGVYYCWQGTHF | |
| | EGGWLPPVWGTGTTVTVSS | | PYTFGGGTKLEIK | |
| SCT-Ga171 | DVQLQESGPALVKPSQTVSLTCTVTGYSITNGN | 102 | DVVMTQTPLTLSVTIGQPASISCKSSQSLLDSD | 381 |
| | HWWNWIRQVSGRKLEWIGYITSSGRTDSNPSLR | | GKTYLNWLLQRPGQSPKRLIYLVSKLDSGVPDR | |
| | SRISITRDTSKNQLFLQLNSVTTENIATYYCAR | | FTGSGSGTDFTLKISRVEAEDLGVYYCWQGTHF | |
| | EGGWLPPVWGTGTTVTVSS | | PYTFGGGTKLEIK | |
| SCT-Ga172 | DVQLQESGPALVKPSQTVSLTCTVTGYSITNGN | 136 | DVVMTQTPLTLSVTIGQPASISCKSSQSLLDSD | 381 |
| | HWWNWIRQVSGSKLEWIGYISSSGRTDSNPSLK | | GKTYLNWLLQRPGQSPKRLIYLVSKLDSGVPDR | |
| | SRISITRDTSKNQLFLQLNSVTTEDIATYYCAR | | FTGSGSGTDFTLKISRVEAEDLGVYYCWQGTHF | |
| | EGGWLPPVWGTGTTVTVSS | | PYTFGGGTKLEIK | |
| SCT-Ga173 | DVQLQESGPALVKPSQTVSLTCTVTGYSITNGN | 137 | DVVMTQTPLTLSVTIGQPASISCKSSQSLLDSD | 398 |
| | HWWNWIRQVSGSKLEWIGYISSSGRTDSNPSLR | | GKTYLNWLLQRPGQSPKRLIYLVSKLDSGVPDR | |
| | SRISITRDTSKNKLFLQLNSVTNEDIATYYCAR | | FTGSGSGTDFTLKISRVEAEDLGLYYCWQGTHF | |
| | EGGWLPPVWGTGTTVTVSS | | PYTFGGGTKLEIK | |
| SCT-Ga174 | DVQLQASGPALVKPYQTVSLTCTVTGYSITNGN | 138 | DVVMTQTPLTLSVTIGQPASISCKSSQSLLDSD | 462 |
| | HWWNWIRQVSGSKLEWIGYISSSGRTDSNPSLR | | GKTYLNWLLQRPGQSPKRLIYLVSKLDSGVPDR | |
| | SRISITRDTSKNQLFLQLNSVTTEDIATYYCAR | | FTGSGSGTDFTLKISRLEAEDLGVYYCWQGTHF | |
| | EGGWLPPVWGTGTTVTVSS | | PYTFGGGTKLEIK | |
| SCT-Ga175 | EVQLQQSGPELVKPGASMKISCKASGYSFTGYI | 139 | DVVMTQTPLSLPVSFGDQVSISCRSSQSLANSY | 464 |
| | LNWVKQSHGKNLEWIGLIVPYTGGTSYNQDFQG | | GNTYLSWYLHKPGQSPQLLIYGISNRFSGVPDR | |
| | KATLTVDRSSSTAYLELLSLTSEDSAVYYCARQ | | FSGSGSGTDFTLKISTIKPEDLGMYYCLQGTHQ | |
| | LRGYFAMDYWGQGTSVTVSS | | PWTFGGGTKLEIK | |
| SCT-Ga176 | QVQLKESGPGLVAPSQSLSITCTVSGFSLTRHG | 140 | DIQMTQSPSSLSASLGERVSLTCRASQEISGYL | 465 |
| | IHWVRQPPGKGLEWLGVIWPGGNTKYNSALMSR | | SWLQQKPDGTIKRLIYAASTLDSGVPKRFSGSR | |
| | LSISKDNSKSQVFLKMNSLQTDDTAMYYCARSG | | SGSDYSLTISSLESEDFADYYCLQYASYPRTFG | |
| | GYGNFAPYYFDQWGQGTTLTVSS | | GGTKLEIK | |
| SCT-Ga177 | QIQLVQSGPELKKPGETVKISCKASGYTFTNYG | 141 | DIVMTQAAFSNPVTLGTSASISCRSSKNLLHSN | 466 |
| | MNWVKKAPGKGLKWMGWINTYTGESTYADDFKG | | GITYLYWYLQRPGQSPQVLIYRMSNLASGVPNR | |
| | RFAFSSETSASTVYLQINNLKNEDTATYFCARD | | FSGSGSGTDFTLRISRVEAEDVGVYYCGQLLEL | |
| | SFAYWGQGTLVTVSA | | PYTFGGGTKLEIK | |
| SCT-Ga178 | EVQLQQSGPELEKPGSSVKISCKASGYSFTDYN | 142 | EIVLTQSPAIMSASPGEKVTMTCSASSSVSSSY | 467 |
| | MHWVKQSNGKSLEWIGDIDVYYSGTSYNQKFKG | | FHWYQQKSGSSPRLLIYDTSNLASGVPVRFSGS | |
| | KATLTVDKSSSTAYMQLKSLTSEDSAVYFCARS | | GSGTSYSLTISRMEAEDAATYYCQQWSSYPLTF | |
| | LLRWYFDVWGAGTTVTVSS | | GAGTKLELK | |
| SCT-Ga179 | QITLKESGPGIVQPSQPFRLTCTFSGFSLSTSG | 143 | DVLMTQTPLSLPVSLGDQASISCRSSQSIVHSD | 468 |
| | IGVTWIRQPSGRGLEWLATIWWDDDNRYNPSLK | | GNTYLEWYLQKPGQSPKLLIYKVSNRFSGVPDR | |
| | SRLTVSKDTSNNQAFLKIITVETADTAIYYCAQ | | FSGSGSGTDFTLKISRVEAEDLGDYYCFQSSHV | |
| | SGGITLMDYWGQGTSVTVSS | | PGTFGGGTKLEIK | |
| SCT-Ga180 | EVQLQQSGPELVKPGASMKISCKASGYSFTGYT | 144 | DVVVTQTPLSLPVSFGDQVSISCRSSQSLANSY | 469 |
| | MNWVKQSHGKNLEWIGLIVPSNGGTSYNQKFKG | | GTTYLSWYLHKPGQSPQLLIYGISNRFSGVPDR | |
| | KATLTVDKSSSTAYMELLSLTSEDSAVYYCARS | | FSGSGSGTDFTLKISTIKPEDLGMYYCLQGTHQ | |
| | LRFSFDYWGQGTTLTVSS | | PPTFGGGTKLEIK | |
| SCT-Ga181 | QIQLVQSGPELKKPGETVKISCKASGYTFTDYS | 145 | QIVLSQSPVILSASPGEKVTMTCRASSSVSDMH | 470 |
| | MHWVKQAPGKGLKWMGWINTETGVPTYADDFKG | | WYQQKPGSSPKPWIYATSNLASGVPARFSGSGS | |
| | RFAFSLETSASTAFLQINNLKNEDTATYFCART | | GTSYSFTISRVEAEDAATYYCQQWSFNPQTFGG | |
| | DYGNPYWYFDVWGAGTTVTVSS | | GTKLEIK | |
| SCT-Ga182 | EVQLQQSGPELVKPGASVKISCKASGYSFTGYT | 146 | DVVVTQTPLSLPVSFGDQVSISCKSSQSLTNSY | 471 |
| | MNWVKQSHGKNLEWIGLIIPYNGGTSYNQKFKD | | GDTYLSWYLHKPGQSPQLLIYGISNRFSGVPDR | |
| | KASLTFDKSSSTAYMELLSLTSEDSAVYYCARG | | FSGSGSGTNFTLKISTIKPEDLGVYSCLQGTHQ | |
| | FRGYFAVDYWGQGTSVTVSS | | PWTFGGGTKLEIK | |
| SCT-Ga183 | QVQLQQPGAELVRPGVSVKLSCKASGYTFTSYW | 147 | DIQMTQSPSSLSASLGERVSLTCRASQDIGSSL | 472 |
| | MHWIKQRPEQGLERIGEIDPTNDYSNYNEKFKS | | NWLQQEPDGTIKRLIYATSSLDSGVPKRFSGSR | |
| | KATLTVDKSSSTAYMHLTSLTSEDSAVYYCARS | | SGSDYSLTISSLESEDFVDYYCLQCATSWTFGG | |
| | RGKDWYFDVWGAGTTVTVSS | | GTKLEIK | |
| SCT-Ga184 | QAYLQQSGAELVRSGASVKVSCKASGYTFTSFN | 148 | DIVMTQSQKFMSTSVGDRVSVTCKASQNVYTNV | 473 |
| | MHWVKQTPGQGLEWIGYFFPGNGATNYNQKFKG | | AWYQQKPGQSPKVLIYSASHRYSGVPDRITGSG | |
| | KATLTADTSSSTAYMQISSLTSEDSAVYFCARE | | SGTDFTLTISNVQSEDLADYFCQQHNRYPYTFG | |
| | GWLSLGYWGQGTTLTVSS | | GGTKLEIK | |
| SCT-Ga185 | QVQLQQSGGDLMKPGASVKISCKATGYTFSNYW | 149 | DIQMTQTTSSLSASLGDRVTISCSASQDISNYL | 474 |
| | IEWVKQRPGHGLEWIGEIFPGGGSAYYNEKFRG | | NWYQQKPDGTVKLLLYYTSSLHSGVPSRFSGSG | |
| | KATFTADKSSDTAYMQLSSLTSEDSAVYYCARQ | | SGTDYSLTISNLEPEDIATYYCQQYSKLPYTFG | |
| | KYGNYYYFDYWGQGTTLTVSS | | GGTNLEMK | |
| SCT-Ga186 | EVQLQQSGPELVKPGASMKISCKASGYSFTGYT | 150 | DVVVTQTPLSLPVSFGDQVSISCRSSQSLANSY | 475 |
| | MNWVKQSHGKNLEWIGLFIPYNGGTSYNQNFRG | | GNTYLSWYLHKPGQSPQLLIYGISNRFSGVPDR | |
| | KATLTVDKSSSTAYMELLSLTSEDSAVYYCARG | | FSGSGSGTDFTLKISTVKPEDLGMYYCLQGTHQ | |
| | LRGFFSMDYWGQGTSVTVSS | | PWTFGGGTKLEIK | |
| SCT-Ga187 | EVQLQQSGPELVKPGASMKTSCKASGYSFTGYT | 151 | DVVVTQTPLSLPVSFGDQVSISCRSSQSLTNSY | 476 |
| | MNWVKQSHGKNLEWIGLIIPYNGGTSYNQKFKD | | GNTYLSWYLHKPGQSPQLLIYGISNRFSGVPDR | |
| | KATLTIDKSSSTAYMELLSLTSEDSAVYYCARG | | FSGSGSGTNFTLKISTIKPEDLGMYYCLQGTHQ | |
| | FRGYFAVDYWGQGTSVTVSS | | PWTFGGGTKLEIK | |
| SCT-Ga188 | QVQLKESGPDLVAPSQSLSITCTVSGFSLTSYG | 152 | DVVMTQSPLSLPVSFGDQVSISCRSSQNLTNSY | 477 |
| | VHWVRQPPGKGLEWLVVIWSDGSTTYNSALKSR | | GNTYLSWYLHKPGQSPQLLIYGISNRFSGVPDR | |
| | LSISKDNSKSQVFLKMNSLQTDDTAMYYCARQI | | FSGSGSGTDFTLKISTIKPEDLGMYYCLQGTHQ | |
| | YYDYGWFAYWGQGTLVTVSA | | PWTFGGGTKLEIK | |
| SCT-Ga189 | EVHLQQSGPELVKPGASMKISCKASGYSFTDYI | 153 | DVVVTQTPLSLPVSFGDQVSISCRSSQSLANSY | 478 |
| | MNWVKQSHGKNLEWIGLIIPYNGGTSYNQKFKG | | GSTFLSWYLHKPGQSPQLLIYGISNRFSGVPDR | |
| | KATLTVDKSSSTAYMEFLSLTSEDSAVYYCARG | | FSGSGSGTDFTLKISTVKPEDLGMYYCLQGTHQ | |
| | LRGYYAMDYWGQGTSVTVSS | | PWTFGGGTKLEIK | |
| SCT-Ga190 | QVQLEQSGGEVMKPGASVKISCKATGYTFSNYW | 154 | DIQMTQTTSSLSASLGDRVTISCSASQGISNYL | 479 |
| | IEWVKQRPGHGPEWIGEILPGSGSAYYNEKFRG | | NWYQQKPDGTVTLLIYYTSSLHSGVPSRFSGSG | |
| | KATFTADKSSNTAYMQLSSLTSEDSAVYYCARQ | | SGTDYSLTISNLEPEDIATYYCQHYSKLPYTFG | |
| | KYGNYYYFDYWGQGTTLTVSS | | GGTKLEIK | |
| SCT-Ga191 | QIQLVQSGPELRKPGETVKISCKASGYTFTDYS | 155 | QIVLSQSPAILSASPGEKVTMTCRASSSVNYIH | 480 |
| | MHWVKQAPGKGLKWMGWINTETGEPTYADDFKG | | WYQQKPGSSPKPWIYATSNLASGVPARFSGSGS | |
| | RFAFSLETSASTAHLQINNLKNEDTATYFCTRT | | GTSYSLTISRVEAEDAATYYCQQWSFNPQTFGG | |
| | DYGNPYWYFDVWGAGTTVTVSS | | GTKLEIK | |
| SCT-Ga192 | EVQLQQSGPELVKPGASVKISCKASGYSFTGYT | 156 | DVVVTQTPLSLPVSFGDQVSISCRSSQSLTNSY | 481 |
| | MNWVKQSHGKNLEWIGLIIPYNGGTSYNQKFKD | | GDTYLSWYLHKPGQSPQLLIYGISNRFSGVPDR | |
| | KATLTIDKSSSTAYMELLSLTSEDSAVYYCARG | | FSGSGSGTNFTLKISTIKPEDLGVYYCLQGTHQ | |
| | FRGYFAVDYWGQGTSVTVSS | | PWTFGGGTKLEIK | |
| SCT-Ga193 | EVQLQQSGPELVKPGASMKISCKASGYSFTGYT | 157 | DVVVTQTPLSLPVSFGDQVSISCRSSQSLANSY | 482 |
| | MNWVKQSHGKNLEWIGLISPYNGGTSYNQKFKG | | GNTYLSWYLHKPGQSPQLLIYGISNRFSGVPDR | |
| | KATLTVDKSSSTVYMELLSLTSEDSAVYYCARS | | FSGSGSGTDFTLKISTIKPEDLGMYYCLQGTHQ | |
| | LRFSFDYWGQGTTLTVSS | | PPTFGGGTKLEIK | |
| SCT-Ga194 | EVQLQQSGPELVKPGASMKTSCKASGYSFTGYT | 158 | DVVVTQTPLSLPVSFGDQVSISCRSSQSLANSY | 483 |
| | MNWVKQSHGKNLEWIGLINPYNGGTSYNQKFKG | | GNTYLSWYLHKPGQSPQLLIYGISNRFSGVPDR | |
| | KATLTVDKSSSTAYMELLSLTSEDSAVYYCARR | | FSGSGSGTDFTLKISTIKPEDLGMYYCLQGTHQ | |
| | NYGYYFDYWGQGTTLTVSS | | PLTFGAGTKLELK | |
| SCT-Ga195 | EVKLVESGGGLVKPGGSLKLSCAASGFDFSRYD | 159 | DIQMNQSPSSLSASLGDTITTTCHASQNINVWL | 484 |
| | MSWVRQTPEKRLEWAATTSSGGSYTYQPDSVKG | | SWYQQKPGNIPKLLIYKASNLHTGVPSRFSGSG | |
| | RFTISRDNARNTLYLQMSSLRSEDTALYYCARQ | | SGTGFTLTISSLQPEDIATYYCQQGQSYPWTFG | |
| | DYRYPYTMDYWGQGTSVTVSS | | GGTTLEIK | |
| SCT-Ga196 | QVTLKESGPGILQPSQTLSLTCSFSGFSLSTYG | 160 | QIVLTQSPALMSASPGEKVTMTCSASSSVSYMY | 485 |
| | IGVGWIRQPSGKGLEWLAHIWWNDNKYYNTALK | | WYQQKPRSSPKPWIYLTSNLASGVPARFSGSGS | |
| | SRLTISKDTSNNQVFLKIASVDTAETATYYCAR | | GTSYSLTISSMEAEDAATYYCQQWSSNPPTFGG | |
| | TGSGKFYFDYWGQGTTLTVSS | | GTKLEIK | |
| SCT-Ga197 | QVQLKESGPGLVAPSQSLSITCTVSGFSLTRHG | 161 | NIMMTQSPSSLAVSAGEKVTMSCKSSQSVLYSS | 486 |
| | VHWVRQPPGKGLEWLGVTWPGGNTKFNSTLMSR | | NQKNFLAWYQQKPGQSPKLLIYWASTRESGVPD | |
| | LSISKDNSKSQVFLKMNTLQTDDTAMYYCARSG | | RFTGSGSGTDFTLTISSVQAEDLAVYYCHQYLS | |
| | GYGNFAPYYFDQWGQGTTLTVSS | | SYTFGGGTKLEIK | |
| SCT-Ga198 | QVQLQQSGAELVKPGASVKMSCKASGYTFTNYW | 162 | DIKMTQSPSSMYASLGERVTITCKASQDIKNYL | 487 |
| | MHWVKLRPGQGLEWIGVIDPSDSFPTYNQKFKG | | SWYPRKPWTSPKTLIYYATALADGVPSGFSGSG | |
| | KATLTVDTSSSTAYMQLSSLTSEDSAVYYCTRG | | SGQDYSLTISSLESDDTATYYCLHHGESPPTFG | |
| | PRGYGDYWGQGTSVTVSS | | GGTKLEIK | |
| SCT-Ga199 | QVQLQQPGSELVRPGASVKLSCKASGYTFTSYW | 163 | DWLTQSPATLSVTPGDSVSLSCRASQNIRNSL | 488 |
| | IHWVKQRHGQGLEWIGNIFPGSGTSNYDEKFNN | | HWFQQKSHESPRLLINYASQSISGIPSRFRGSG | |
| | KGTLTVDTSSSTSYMHLSSLTSEDSAVYYCARE | | SGTDFTLSINSLETEDFGMYFCLQSNSWPYTFG | |
| | GLYAFDYWGQGTTLTVSS | | GGTKLEIK | |
| SCT-Ga200 | QAYLQQSGAELVRSGASVKMSCKASGYTFTSYN | 164 | DIVLTQSPAIMAASLGQKVTMTCSASSSVNSTY | 489 |
| | MHWVKQTPGQGLEWIGKIFPGNGFTDYNQKFRD | | FHWYQQKSGASPKTMIHRSSNLASGVPAHFSGS | |
| | KATLTADTSSSTAYMQISSLTSEDSAVYFCTRE | | GSGTSDSLTISSVEADDDATYYCHQWSGYPFTF | |
| | GWLSLGYWGQGTTLTVSS | | GAGTKLELK | |
| SCT-Ga201 | EVQLQQSGPELVKTGASVKISCKASGYAFTGYY | 165 | DIVMTQSHKFMSTSVGDRVSITCKASQDVSTDV | 490 |
| | IHWVKQSHGKSLEWIGHITCYNGATNYNQNFKG | | AWYQQRPGQSPKLLTYSASYRYTGVPDRFTGSG | |
| | KATFTVDTSSSTAYMQFNSLTSEDSAVYYCARS | | SGTDFTFTINNVQAEDLAVYYCQQHYSTPYTFG | |
| | NYRPWYFDVWGAGTTVTVSS | | GGTKLEIK | |
| SCT-Ga202 | QVQLQQSGGDLMKPGASVKISCKATGYTFSNYW | 166 | DIQMTQTTSSLSASLGDRVTISCSASQDISNYL | 474 |
| | IEWVKQRPGHGLEWIGEIFPGGGSAYYNEKFRG | | NWYQQKPDGTVKLLLYYTSSLHSGVPSRFSGSG | |
| | KATFTADKSSDTAYMQLSSLTSEDSAVYFCARQ | | SGTDYSLTISNLEPEDIATYYCQQYSKLPYTFG | |
| | KYGNYYYFDYWGQGTTLTVSS | | GGTNLEMK | |
| SCT-Ga203 | QVQLQQPGSELVRPGASVKLSCKASGYTFTSFW | 167 | DIVLTQSPATLSVTPGDSVSLSCRASQSVRNNL | 491 |
| | IHWVKQRPGQGLEWIGNIFPGGGDPNYDEKFRT | | HWFQQKSHESPRLLIKYASQSFSGIPSRFSGSG | |
| | KGTLTVDTSSSTAYMHLSSLTSEDSAVYFCARE | | SGTDFTLSTNSLETEDFGMYFCQQSNSWPYTFG | |
| | GLYAFDYWGQGTTLTVSS | | GGTKLEIK | |
| SCT-Ga204 | QVQLQQSGGEVMKPGASVKMSCKASGYTFSNYW | 168 | DIQMTQTTSSLSASLGDRVTISCSASQDISNYL | 492 |
| | IEWLRQRPGHGLEWIGEIFPGSDSSYYNERFKG | | NWYQQKPDGTVKLLIYYTSTLHSGVPSRFSGSG | |
| | KATFTTDKSSDTAYMQLSSLTSEDSAVYYCARQ | | SGTDYSLTISNLEPEDIATYYCQQYSKLPYTFG | |
| | KYGNFYYFDYWGQGTTLKVSS | | GGTKLEIK | |
| SCT-Ga205 | QVQLKESGPGLVAPSQSLSITCTVSGFSLTRMG | 169 | NIMMTQSPSSLAVSAGEKVTMSCKSSQSVLYSS | 493 |
| | VHWVRQPPGKGLEWLGVIWPGGSTKYNSALMSR | | NQKNYLAWYQQKPGQSPKLLIYWASTRESGVPD | |
| | LSINKDNSKSQVFLKMNSLQTADTAMYYCARSG | | RFTGSGSGTDFTLTISNVQAEDLAVYYCHQYLS | |
| | GYGNFAPYYFDQWGQGTTLTVSS | | SYTFGGGTTLEIK | |
| SCT-Ga206 | QAYLQQSGAELVRSGASVKMSCKASGYTFTSYN | 170 | DIVMTQSQKFMSTSIGDRVSVTCKASQNVGTNV | 494 |
| | MHWVKQTPGQGLEWTGKTFPGNGFTDYNQNFRD | | AWYQQKPGQSPKALTYSASYRYSGVPDRFTGSG | |
| | KATLTADTSSSTAYMQISSLTSEDSAVYFCTRE | | SGTDFTLTISNVQSEDLADYFCQQHNSYPYTFG | |
| | GWLSLGYWGQGTTLTVSS | | GGTKLEIK | |
| SCT-Ga207 | QVQLQQPGSELVRPGASVKLSCKASGYTFTSYW | 171 | DIVMSQSPSSLAVSAGEKVTMSCKSSQSLLNSR | 495 |
| | MHWVKQRHGQGLEWIGNIFPGSGTTNYDEKFKN | | TRKNSLAWYQQKPGQSPKLLVYWASTRESGVPD | |
| | KGTLTVDTSSSTAYMHLSSLTSEDSAVYYCARE | | RFTGSGSGTDFTLTISSVQAEDLAVYYCKQSFN | |
| | GLYAFDYWGQGTTLTVSS | | LYTFGGGTKLEIK | |
| SCT-Ga208 | QVQLQQPGSELVRPGASVKLSCKASGYTFTSYW | 172 | DIVLTQSPATLSVTPGDSVSLSCRASQSIRNSL | 496 |
| | MHWVKQRHGQGLEWIGNIFPGSGTNNYDEKFKN | | HWFQQKSHESPRLLINYASQSISGIPSRFRGSG | |
| | KGTLTVDTSSSTAYMHLSSLTSEDSAVYYCARE | | SGTDFTLSINSLETEDFGMYFCQQSYSWPYTFG | |
| | GLYAFDYWGQGTTLTVSS | | GGTRLEIK | |
| SCT-Ga209 | EVQLQQSGPELVKPGASMKTSCKASGYSFTGYT | 173 | DVVMTQTPLSLPVSFGDQVSISCRSSQSLANSY | 497 |
| | MNWVKQSHGKNLEWLGLIFPYNSATSYNQKFTG | | GNTYLSWYLHKPGQSPHLLIYGISNRFSGVPDR | |
| | KATITVDKSSNTTYMELLSLTSEDSAVYYCARG | | FSGSGSGTDFTLKISTIKPEDLGMYYCLQGTHQ | |
| | LRGFFALDYWGQGTSVTVSS | | PWTFGGGTKLEIK | |
| SCT-Ga210 | QVQLQQPGSELVRPGASVKLSCKASGYTFTSYW | 174 | DIVLTQSPATLSVTPGDSVSLSCRASQNIRNSL | 498 |
| | IHWVKQRHGQGLEWIGNIFPGSGTSNYDEKFKN | | HWFQQKSHESPRLLINYASQSISGIPSRFRGSG | |
| | KGTLTVDTSSSTAYMHLSSLTSEDSAVYYCARE | | SGTDFTLSINSLETEDFGMYFCLQSNSWPYTFG | |
| | GLYAFDYWGQGTTLTVSS | | GGTKLEIK | |
| SCT-Ga211 | QVQLKESGPGLVAPSQSLSITCTVSGFSLTRHG | 175 | NIMMTQSPSSLAVSAGEKVTMSCKSSQSVLYSS | 486 |
| | VHWVRQPPGKGLEWLGVIWPGGNTKFNSTLMSR | | NQKNFLAWYQQKPGQSPKLLIYWASTRESGVPD | |
| | LSISKDNSKSQVFLKMNTLQTDDTAMYYCASSG | | RFTGSGSGTDFTLTISSVQAEDLAVYYCHQYLS | |
| | GYGNFAPYYFDQWGQGTTLTVSS | | SYTFGGGTKLEIK | |
| SCT-Ga212 | EVKLVESGGGLVKPGGSLKLSCAASGFAFSTYD | 176 | DIVMTQSPATLSVTPGDRVSLSCRASQSISDYL | 499 |
| | MSWVRQTPEKRLEWVATTSSGGSYTYYPDSVKG | | HWYQQKSHESPRLLIKYASQSISGIPSRFSGSG | |
| | RFTISRDNARNTLYLQMSSLRSEDTALYYCARQ | | SGSDFTLSINSVEPEDVGVYYCQDGNTFPPTFG | |
| | DYRYPYTMDYWGQGTSVTVSS | | GGTKLEIK | |
| SCT-Ga213 | EVQLQQSGPELEKPGSSVKISCKASGYSFTDYN | 177 | EIVLTQSPAIMSASPGEKVTVTCSAGSSVSSSY | 500 |
| | MHWVKQSNGKSLEWTGDTDVYYSGTSYNQKFKG | | LHWYQQKSGSSPRLLIYDTSKLASGVPVRFSGS | |
| | KATLTVDKSSSTTYMELKSLTSEDSAVYFCARS | | GSGTSYALTISRMEAEDAATYYCQQWSSYPLTF | |
| | SLRWYFDLWGAGTTVTVSS | | GAGTKLELK | |
| SCT-Ga214 | QVQLQQSGGEVMKPGASVKISCKATGYTFSNYW | 178 | DIQMTQTTSSLSASLGDRVTISCSASQGISNYL | 479 |
| | IEWVKQRPGHGLEWIGEILPVSGSAYYNEKFRG | | NWYQQKPDGTVTLLIYYTSSLHSGVPSRFSGSG | |
| | KATFTADKSSNTAYMQLSSLTSEDSAVYYCARQ | | SGTDYSLTISNLEPEDIATYYCQHYSKLPYTFG | |
| | KYGNYYYFDYWGQGTTLTVSS | | GGTKLEIK | |
| SCT-Ga215 | QTFLQQSGAELVRSGASVKMSCRASGYTFSSHN | 179 | DIVMTQSQKFMSTSTGDRVSVTCKASQNWTNV | 501 |
| | MHWIKQTPGQGLEWIGKIFPGNGFTDYNQKFRD | | AWYQQKPGQSPKALIYSASYRYSGVPDRFTGSG | |
| | KATLTADTSSSTAYMQIGSLTSEDSAVYFCTRE | | SGTDFTLTISNVQSEDLADYFCQQHNSYPYTFG | |
| | GWLSLGYWGLGTTLTVSS | | GGTRLEIK | |
| SCT-Ga216 | EVQLQQSGPELVKPGASMKISCKASGYSFTDYT | 180 | DVVVTQTPLSLPVSFGDQVSISCRSSQSLANSY | 502 |
| | MNWVKQSHGKNLEWLGLIFPYNGATSYNQKFKG | | GNTYLSWYLHKPGQSPHLLIYGISNRFSGVPDR | |
| | KATITVDKSSSTAYMELLSLTSEDSAVYYCARG | | FSGSGSGTDFTLKISTIEPEDLGMYYCLQGTHQ | |
| | LRGFFALDYWGQGTSVTVSS | | PWTFGGGTKLEIK | |
| SCT-Ga217 | EVQLQQSGPELVKPGASMKISCKASGYSFTGYI | 181 | DVVVTQTPLSLPVSFGDQVSISCRSSQSLANSY | 503 |
| | MNWVKQSHGKNLEWIGLIVPNNGGTSYNQKFKG | | GTTYLSWYLHKPGQSPQLLIYGISNRFSGVPDR | |
| | KATLTVDKSSNTAYMELLSLTSEDSAVYYCARS | | FSGSGSGTDFTLKISTVKPEDLGMYYCLQNTHQ | |
| | LRFSFDYWGQGTTLTVSS | | PPTFGGGTKLEIK | |
| SCT-Ga218 | QITLKESGPGTVQPSQPFRLTCTFSGFSLSTSG | 182 | DVLMTQTPLSLPVSLGDQASISCRSSQSIVYSN | 504 |
| | IGVTWIRQPSGKGLEWLATIWWDDDTRYNPSLK | | GNTYLAWYLQKPGQSPKLLIYKVSNRFSGVPDR | |
| | SRLTVSKDTSNNQAFLNILTVETADTAIYYCAQ | | FSGSGSGTDFTLKISRVEAEDLGVYYCFQGSHV | |
| | SGGITLMDYWGQGTSVTVSS | | PFTFGSGTKLEIK | |
| SCT-Ga219 | EVQLQQSGPELVKPGASMKTSCKASGYSFTGYT | 183 | DVVVTQTPLSLPVSFGDQVSISCRSSQSLANSY | 505 |
| | MNWVKQSHGKNLEWIGLIVPYNGGTSYNQKFKG | | GTTYLSWYLYKPGQSPQLLIYGISNRFSGVPDR | |
| | KATLTVDKSSSTAYMELLSLTSEDSAVYYCARS | | FSGSGSGTDFTLKISTIKPEDLGMYYCLQGTHQ | |
| | LRFSFDYWGQGTTLTVSS | | PPTFGGGTKLEIK | |
| SCT-Ga220 | EVKLVESGGGLVQPGGSLRLSCATSGFTFTDYY | 184 | DIQMTQSSSYLSVSLGGRVTITCKASDHINNWL | 506 |
| | MSWVRQPPGKALEWLALIRNKAKGYTTEYSASV | | awyqqkpgnapRLLISGATSLETGVPSRFSGSG | |
| | KGRFTISRDNSQSTLYLQMNTLRAEDSATYYCA | | SGKDYILSITSLQTEDVATYYCQQYWSTPFTFG | |
| | RDGGYWGQGTTLTVSS | | SGTKLEIK | |
| SCT-Ga221 | QVSLKESGPGILQPSQTLSLTCSFSGFSLSTSG | 185 | NIMMTQSPSSLAVSAGEKVTMSCKSSQSVLYSS | 507 |
| | MGVGWIRQPSGKGLEWLAHIWWDDVKRYNPALE | | NQKNYLAWYQQKPGQSPKLLIYWASTRESGVPD | |
| | SRLTISKDSSSSQVFLKIASVDTADTATYYCAR | | RFTGSGSGTDFTLTISSVQAEDLAVYYCHQYLS | |
| | IAVGQAWFAYWGQGTLVTVSS | | SLTFGAGTKLELR | |
| SCT-Ga222 | EVQLQQSGPELVKPGASMKISCKASGYSFTGYT | 186 | DVVVTQTPLSLPVSFGDQVSISCRSSQSLANSY | 469 |
| | MNWVKQSHGKNLEWIGLIFPYNGGTSYNQKFKG | | GTTYLSWYLHKPGQSPQLLIYGISNRFSGVPDR | |
| | KATLTVDKSSSTAYMELLSLTSEDSAVYYCARS | | FSGSGSGTDFTLKISTIKPEDLGMYYCLQGTHQ | |
| | LRFSFDYWGQGTTLTVSS | | PPTFGGGTKLEIK | |
| SCT-Ga223 | EVQLQQSGPELVKPGASMKISCKASGYSFTGYI | 181 | DVVVTQTPLSLPVSFGDQVSISCRSSQSLANSY | 508 |
| | MNWVKQSHGKNLEWTGLTVPNNGGTSYNQKFKG | | GTTYLSWYLHKPGQSPQLLIYGISNRFSGVPDR | |
| | KATLTVDKSSNTAYMELLSLTSEDSAVYYCARS | | FSGSGSGTDFTLKISTVKPEDLGMYYCLQGTHQ | |
| | LRFSFDYWGQGTTLTVSS | | PPTFGGGTKLEIK | |
| SCT-Ga224 | QVQLQQSGAELVRPGTSVKISCKPSGYIFTNYW | 187 | DIQMTQSPASLSASVGETVTITCRSSENIYSYL | 509 |
| | LGWVKQRPGHGLEWIGDIYPGGGYTNYNEKFKG | | AWYQQKQGKSPQLLVYNAKILAEGVPSRFSGSG | |
| | RATLTADTSSSTAYMQLSSLTSEDSAVYFCARS | | SGTQYSLKINSLQPEDFGSYYCQHHYGTPPTFG | |
| | RQLASYAMDYWGQGTSVTASS | | GGTNLEIK | |
| SCT-Ga225 | EVQLQQSGPEMVKPGASMKTSCKASGYSFTGYT | 188 | DVVMTQTPLSLPVSFGDQVSISCRSSQSLANSY | 510 |
| | MNWVKQSHGKNLEWLGLIFPYNSATSYNQKFTG | | GNTYLSWYLHKPGQSPHLLIYGISNRFSGVPDR | |
| | KATTTVDKSSNTTYMELLSLTSEDSAVYYCARG | | FSGSGSGTDFTLKISTIKPEDLGMYYCLQGTHQ | |
| | LRGFFALDYWGQGTSVTVSS | | PWTFGGGTKLEIR | |
| SCT-Ga226 | EVNLVESGGGLVQPGGSLRLSCATSGFPFNDYY | 189 | DIQMTQSSSYLSVSLGGRVTITCKASDHINNWL | 511 |
| | MSWVRQPPGKALEWLCLIRNKANGYTTEYSSSV | | AWYQQKPGNSPRLLISGATSLGAGVPSRFSGSG | |
| | KGRFTISRDNSQSILYLQMNTLRAEDSATYYCA | | SGKDYTLSITSLQTEDVGTYYCQQYWSIPFTFG | |
| | RDGGYWGQGTTLTVSS | | SGTKLEIK | |
| SCT-Ga227 | QAYLQQSGAELVRSGASVKMSCKASGYTFTSYN | 190 | QWLTQSPAIMSASPGEKVTMTCSASSSVSYMH | 512 |
| | LHWVKQTPGQGLEWIGYIYPGNGYTNYNQKFKG | | WYQQKSGTSPKRWIYATSKLASGVPARFSGNGS | |
| | KATLTADTSSSTAYMQISSLTSEDSAVYFCARE | | GTSYSLTISSMEAEDAATYYCQQWNSNPPTFGA | |
| | GGWAMDYWGQGTSVTVSS | | GTKLDLK | |
| SCT-Ga228 | EVQLQQSGPELVKPGASMKISCKASGYSFTGYT | 191 | DVVVTQTPLSLPVSFGDQVSISCRSSQSLANSY | 513 |
| | MNWVRQSHGKNLEWIGLINPYNGGTSYNQKFKG | | GDTFLSWYLHKPGQSPQLLIYGISNRFSGVPDR | |
| | KATLTVDKSSSTAYMELRSLTSEDSAVYYCARR | | FSGSGSGTDFTLKISTIKPEDLGMYYCLQGTHQ | |
| | NYGYYFDYWGQGTTLTVSS | | PLTFGAGTKLELK | |
| SCT-Ga229 | QITLKESGPGIVQPSQPFRLTCTFSGFSLSTSG | 192 | DVLMTQTPLSLPVSLGDQASISCRSSQSIVHSD | 514 |
| | IGVTWIRQPSGKGLEWLATIWWDDDNRYNPSLK | | GNTYLEWYLQKPGQSPKLLIYKVSNRFSGVPDR | |
| | SRLTVSKDTSNNQAFLNIITVETADTAIYYCAQ | | FSGSGSGTDFTLKISRVEAEDLGVYYCFQSSHV | |
| | SGGITLMDYWGQGTSVTVSS | | PGTFGGGTKLEIK | |
| SCT-Ga230 | EVKLVESGGGLVQPGGSLRLSCATSGFTFTDYY | 193 | DIQMTQSSSYLSVSLGGRVTITCKASDHINNWL | 515 |
| | MSWVRQPPGKALEWLALIRNKAHGYTTEYSASV | | AWYQQKPGNAPRLLISGATSLKTGVPSRFSGSG | |
| | KGRFTISKDNSQSILYLQMNTLRAEDSATYYCA | | SGKDYTLSITSLQTEDVATYYCQQYWSTPFTFG | |
| | RDGGYWGQGTTLTVSS | | SGTKLEIK | |
| SCT-Ga231 | EVQLQQSGTVLARPGASVKMSCKTSDYSFTSYW | 194 | DIVLTQSPATLSVTPGDSVSLSCRASQSIYNNL | 516 |
| | MHWVKQRPGQGLEWIGAIYPGNSAARYNQKFKG | | HWYQQNSHESPRLLIKYASQSISGIPSRFSGSG | |
| | KAKLTAVTSANTAYMELSSLTNEDSAVYYCSRE | | SGTDFTLSINSVETEDFGLYFCQQSNSWPYTFG | |
| | GGYGLDYWGQGTSVTVSS | | GGTRLEIN | |
| SCT-Ga232 | EVQLQQSGPELEKPGSSVKISCKASGYSFTDYN | 177 | EIVLTQSPAIMSASPGEKVTVTCSAGSSVSSSN | 517 |
| | MHWVKQSNGKSLEWIGDIDVYYSGTSYNQKFKG | | LHWYQQKSGSSPRLLIYDTSKLASGVPVRFSGS | |
| | KATLTVDKSSSTTYMELKSLTSEDSAVYFCARS | | GSGTSYALTISRMEAEDAATYYCQQWSSYPLTF | |
| | SLRWYFDLWGAGTTVTVSS | | GAGTKLELK | |
| SCT-Ga233 | QVQLKESGPGLVAPSQSLSITCTVSGFSLTRHG | 140 | NIMMTQSPSSLAVSAGEKVTMSCKSSQNILYSS | 518 |
| | IHWVRQPPGKGLEWLGVIWPGGNTKYNSALMSR | | NQKNYLAWYQQKPGQSPKLLIYWASTRESGVPD | |
| | LSISKDNSKSQVFLKMNSLQTDDTAMYYCARSG | | RFTGSGSGTDFTLTISSVQAEDLAVYYCHQYLS | |
| | GYGNFAPYYFDQWGQGTTLTVSS | | SYTFGGGTKLEIK | |
| SCT-Ga234 | QVQLQQSGGEVMKPGASVKISCQATGYTFSNYW | 195 | DIQMTQTTSSLSASLGDRVTISCSASQGISNYL | 519 |
| | IEWLKQRPGHGLEWTGEILPVSGSSYYNEKFRG | | NWYQQKPDGTVTLLIYYTSSLNSGVPSRFSGSG | |
| | KATFSADKSSNTAYMQLSSLTSEDSAVYYCARQ | | SGTDYSLTISNLEPEDIATYYCQHYSKLPYTFG | |
| | KYGNYYYFDYWGQGTTLTVSS | | GGTKLEMK | |
| SCT-Ga235 | QVQLQQSGGDLMKPGASVKTSCKATGYTFSNYW | 196 | DIQMTQTTSSLSASLGDRVTISCSASQGLSNYL | 520 |
| | IEWVKQRPGHGLEWIGEILPGSGSSYYNEKFKG | | HWYQQKPDGTVKLLIYYTSSLHSGVPSRFSGSG | |
| | KATFTADTSSSTAYMQLSSLTSEDSAVYYCARQ | | SGTDYSLTISNLEPEDIATYYCQQYSKLPYTFG | |
| | KYGNYYYFDFWGQGTSLTVSS | | GGTKLEIK | |
| SCT-Ga236 | QVQLQQPGSELVRPGASVKLSCKASGYTFTSYW | 171 | DIVLTQSPATLSVTPGDSVSLSCRASQSIRNSL | 521 |
| | MHWVKQRHGQGLEWTGNIFPGSGTTNYDEKFKN | | HWFQQKSHESPRLLINYASQSVSGIPSRFRGSG | |
| | KGTLTVDTSSSTAYMHLSSLTSEDSAVYYCARE | | SGTDFTLSINSLETEDFGMYFCQQSNSWPYTFG | |
| | GLYAFDYWGQGTTLTVSS | | GGTKLEIK | |
| SCT-Ga237 | EVMLVESGGGLVEPGGSLKLSCAASGFTFSTYA | 197 | NIMMTQSPSSLAVSAGEKVTMSCKSSQSVLYSS | 522 |
| | MSWVRQTPEKRLEWVATISSGGTYTYYPDSVKG | | NQMNYLAWYQQKPGQSPKVLIYWASTRESGVPD | |
| | RFTISRDNAKNTLYLQMSSLRSEDTAMYYCARH | | RFTGGGSGTDFTLTISSVQAEDLALYYCHQYLS | |
| | FTSTIITHFDYWGHGTTLTVSS | | SLTFGAGTKLELK | |
| SCT-Ga238 | EVQLQQSGTVLARPGASVKMSCKASGYSITSYW | 198 | DVVLTQSPATLSVTPGDSVSLSCRASQTISNNL | 523 |
| | MHWVKQRPGQGLEWTGGVYPGNSNTNYNQKFKG | | HWFQQKSHESPRLLIKYSSQSISGIPSRFSGSG | |
| | KAKLTAVTSASTAYMELSSLTNEDSAVYYCTRE | | SGTDFTLSINSVETEDFGMYFCQQSYSWPYTFG | |
| | GGYGMDYWGQGTSVTVSS | | GGTKLEIK | |
| SCT-Ga239 | QAYLQQSGAELVRSGASVKMSCKASGYTFTSYN | 170 | DIVMTQSQKFMSTSVGDRVSITCKASQNWTNV | 524 |
| | MHWVKQTPGQGLEWIGKIFPGNGFTDYNQNFRD | | AWYQQKPGQSPKALIYSASYRYSGVPDRFTGSG | |
| | KATLTADTSSSTAYMQISSLTSEDSAVYFCTRE | | SGTDFTLTISNVQSEDLADYFCQQHNSYPYTFG | |
| | GWLSLGYWGQGTTLTVSS | | GGTKLEIK | |
| SCT-Ga240 | QVQLQQPGSELVRPGASVKLSCKASGYTFTSYW | 199 | DIVLTQSPATLSVTPGDSVSLSCRASQNIRNSL | 525 |
| | MHWVKQRHGQGLEWIGNIFPGSGTTNYDEKFKN | | HWFQQKSHESPRLLINYASQSISGIPSRFRGSG | |
| | KGTLTVDTSSNIAYMHLSSLTSEDSAVYYCARE | | SGTDFTLTINSLETEDFGVYFCQQSNSWPYTFG | |
| | GLYAFDYWGQGTTLTVSS | | GGTKLEIK | |
| SCT-Ga241 | QTQLVQSGPELKKPGETVKTSCKASGYTFTDYS | 200 | QIVLSQSPAILSASPGEKVTMTCRASSSVNYMH | 526 |
| | MHWVKQAPGKGLKWMGWINTETGEPTYADDFKG | | WYQQKPGSSPKPWIYATSNLASGVPARFSGSGS | |
| | RFAFSLETSASTAYLQINNLKNEDTATYFCTRT | | GTSYSLTISRVEAEDAATYYCQQWNFNPQTFGG | |
| | NYGNPYWYFDVWGAGTTVTVSS | | GTKLEIK | |
| SCT-Ga242 | EVNLVESGGGLVQPGGSLRLSCATSGFTFNDYY | 201 | DIQMTQSSSYLSVSLGGRVTITCKASDHINNWL | 527 |
| | MSWVRQPPGKALEWLCLIRNKANGYTTEYSASV | | AWYQQKPGNAPRLLISGATSLGAGVPSRFSGSG | |
| | KGRFTISRDNSQSILYLQMNTLRAEDSATYYCA | | SGKDYTLSITSLQTEDVATYYCQQYWSIPFTFG | |
| | RDGGYWGQGTTLTVSS | | SGTKLEIK | |
| SCT-Ga243 | EVQLQQSGPELVKPGASMKISCKASGYSFIDYI | 202 | DWLTQTPLSLPVSLGDQVSISCRSSQSLTNSY | 528 |
| | MNWVKQSHGKNLEWIGLIIPYNGGTSYNQKFKG | | GSTFLSWYLHKPGQSPQLLIYGISNRFSGVPDR | |
| | KATLTVDKSSSTASMEFLSLTSEDSAVYYCARG | | FSGSGSGTDFTLKISTVKPEDLGMYYCLQGTHQ | |
| | LRGYYAMDYWGQGTSVTVSS | | PWTFGGGTKLEIK | |
| SCT-Ga244 | QVQLQQPGSELVRPGASVKLSCKASGYTFTSYW | 203 | DIVLTQSPATLSVTPGDSVSLSCRASQNIRNNL | 529 |
| | MHWVKQRHGQGLEWIGNIFPGTGSANYDERFKN | | HWFQQKSHESPRLLIKYASQSISGIPSRFSGSG | |
| | KGTLTVDTSSSTAYMHLSSLTYEDSAVYYCTRE | | SGTDFTLSINSLETEDFGMYFCQQSNSWPYTFG | |
| | GLYPFDYWGQGTTLTVSS | | GGTKLEIK | |
| SCT-Ga245 | QVQLKQSGPGLVQPSQSLSITCTVSGFSLTSYG | 204 | QIVLTQSPAIMSASLGERVTMTCTASSSVISSY | 530 |
| | VHWVRQSPGKGLEWLGVIWSGGSTDYNAAFISR | | LHWYQQKPGSSPKLWIYSTSNLASGVPARFSGS | |
| | LSISKDNSKSQVFFKMNSLQTNDTAIYYCAREV | | GSGTSYSLTISSMEAEDAATYYCHQYHRSPLTF | |
| | RRYFDVWGAGTTVTVSS | | GAGTKLELK | |
| SCT-Ga246 | QITLKESGPGIVQPSQPFRLTCTFSGFSLSTSG | 205 | DVLMTQSPLSLPVSLGDQASISCRSSQSIVHSD | 531 |
| | IGVTWIRQPSGKGLEWLATIWWDDDNRYNPSLK | | GNTYLEWYLQKPGQSPKLLIYKVSRRFSGVPDR | |
| | SRLTVSKDTSNNQVFLNIIALETADTAMYYCAQ | | FSGSGSGTDFTLKISRVGAEDLGVYYCFQGSHV | |
| | SGGITLMDYWGQGTSVTVSS | | PGTFGGGTKLEIK | |
| SCT-Ga247 | EVQLQQSGPELVRPGGSMKISCKASGYSFTGYT | 206 | DVVMTQTPLSLPVSFGDQVSISCRSSQNLTNSY | 532 |
| | MNWVKQSHGQNLEWIGLIIPYNGGSSYNQKFQG | | GNTYLSWYLHKPGQSPQLLIYGISNRFSGVPDR | |
| | KATLTVDKSSSTAYMELLSLTSEDSAVFYCARG | | FSGSGSGTDFTLKISTIKPEDLGMYYCLQGTHQ | |
| | LRGYFAMDYWGQGTSVTVSS | | PWTFGGGTKLEIK | |
| SCT-Ga248 | QAYLQQSGAELVRSGASVKMSCKASGYTFTSYN | 207 | QIVLTQSPAIMSASPGEKVTMTCSASSSVNYMH | 533 |
| | LHWVKQTPGQGLKWIGYIYPGNGYTHYNQKFKG | | WYQQKSGTSPKRWIYDTSKLASGVPARFSGSGS | |
| | KATLTADTSSSTAYMQINSLTSEDSAVYFCARE | | GTSYSLTISSMEAEDAATYYCQQWNSNPPTFGA | |
| | GGWAMDYWGQGTSVTVSS | | GTKLELK | |
| SCT-Ga249 | QVQLQQSGGELMKPGASVKISCKATGYTFSNYW | 208 | AIQMTQTTSSLSASLGDRVTISCSASQGIGNYL | 534 |
| | IEWVKQRPGHGLEWIGEILPGSGSSYYNEKFKG | | NWYQQKPDGTVKLLIYYTSSLHSGVPSRFSGSG | |
| | RATFTADKSSNTAYMQLSSLTSEDSAVYYCARQ | | SGTDYSLTISDLEPEDIATYYCHQYSKLPYTFG | |
| | KYGNFYYFDFWGQGTTLTVSS | | GGTKLEIK | |
| SCT-Ga250 | QIQLVQSGPELKKPGETVKISCKASGYTFTNYG | 209 | DIVMTQAAFSNPVTLGTSASISCRSSKNLLHSN | 535 |
| | MNWVKQAPGKGLKWMGWISTYIGEPTCADDFKG | | GITYLYWYLQRPGQSPQLLIYRVSNLASGVPNR | |
| | RFAFSLDTSASTAYLQINNLKNEDTATYFCARD | | FSGSESGTDFTLRISRVEAEDVGVYYCGQLLEL | |
| | SFAHWGQGTLVTVSA | | PYTFGGGTKLEIK | |
| SCT-Ga251 | QAYLQQSGAELVRSGASVKMSCKASGYTFTSYN | 210 | QIVLTQSSAIMSASPGEKVTMTCSATSSVSSMH | 536 |
| | LHWVKQTPGQGLKWIGYIYPGNGYTNYNQKFKG | | WYQQKSGTSPKRWIYDTSKLASGVPARFSGSGS | |
| | KATLTADTSSSTAYMQTNSLTSEDSAVYFCARE | | GTSYSLTISSMEAEDAATYYCQQWSSNPSTFGA | |
| | GGWAMDYWGQGTSVTVSS | | GTKLELK | |
| SCT-Ga252 | QVQLQQPGSELVRPGASVKLSCKASGYTFTSFW | 211 | DIVLTQSPATLSVTPGDSVSLSCRASQSIRSSL | 537 |
| | MHWVKQRHGQGLEWTGNIYPGSGTTNFDEKFKS | | HWFQQKSHESPRLLITYASQSISGIPSRFSGSG | |
| | KVTLTVDTSSSTAFMHLSSLTSEDSAVYYCTRE | | SGTDFTLSINSLETEDFGVYFCQQSNTWPYTFG | |
| | GLYAFDQWGQGTTLTVSS | | GGTKLEIK | |
| SCT-Ga253 | QVQLQQPGSELVRPGASVKLSCKASGYTFTSYW | 171 | DIVLTQSPATLSVTPGDSVSLSCRASQSIRNSL | 538 |
| | MHWVKQRHGQGLEWIGNIFPGSGTTNYDEKFKN | | HWFQQKSHESPRLLINYASQSISGIPSRFRGSG | |
| | KGTLTVDTSSSTAYMHLSSLTSEDSAVYYCARE | | SGTDFTLSINSLETEDFGMYFCQQSNSWPYTFG | |
| | GLYAFDYWGQGTTLTVSS | | GGTKLEIK | |
| SCT-Ga254 | QVQLQQSGAELVRPGTSVKISCKASGYTFTIHW | 212 | DVVMTQTPLTLSVTIGQPASISCKSSQSLLDSD | 539 |
| | LGWVRQRPGHGLEWTGDIYPGGGYTNYNEKFKG | | GKTYLNWLLQRPGQSPKRLIYLVSKLDSGVPDR | |
| | KATLTADTSSSTAYMQFSSLTSEDSAVYFCARD | | FTGSGSGTDFTLKISRVEAEDLGVYYCWQGTHF | |
| | YGYDVYAMDYWGQGTSVTVSS | | PRTFGGGTKLEIK | |
| SCT-Ga255 | EVKLVESGGGLVKPGGSLKLSCAASGFAFSSFD | 213 | DIQMNQSPSSLSASLGDTITITCHASQNINVWL | 540 |
| | MSWVRQTPEKRLEWVAVTSSGGSYTFYPDSVKG | | SWYQQKPGNIPKLLIYKASNLHTGVPSRFSGSG | |
| | RFTISRDNARNTLYLQMSSLRSEDTALYFCTRQ | | SGAGFTLTISSLQPEDIATYYCQQGQSYPWTFG | |
| | DYRYPYTMDYWGQGTSVTVSS | | GGTKLEIK | |
| SCT-Ga256 | QVQLQQSGAELVRPGTSVKISCKPSGYIFTNFW | 214 | DIQMTQSPASLSASVGETVTITCRSSENIYSYL | 541 |
| | LGWVKQRPGHGLEWIGDIYPGGGYINYNEKFKG | | AWYQQKQGKSPQLLVYNAKILAEGVPSRFSGSG | |
| | RATLTADTSSSTAYMQLSSLTSEDSAVYFCARS | | SGTQYSLKINSLQPEDFGTYYCQHHYGTPPTFG | |
| | RQLASYAMDYWGQGTSVTASS | | GGTNLEIK | |
| SCT-Ga257 | QTTLKESGPGIVQPSQPFRLTCTFSGFSLSTSG | 182 | DVLMTQTPLSLPVSLGDQASISCRSSQNIVHSN | 542 |
| | IGVTWIRQPSGKGLEWLATIWWDDDTRYNPSLK | | GNTYLEWYLQKPGQSPKLLIYKVSNRFSGVPDR | |
| | SRLTVSKDTSNNQAFLNILTVETADTATYYCAQ | | FSGSGSGTDFTLKISRVEAEDLGVYYCFQTSHV | |
| | SGGITLMDYWGQGTSVTVSS | | PGTFGGGTKLEIK | |
| SCT-Ga258 | EVKLVESGGGLVQPGGSLRLSCATSGFTFTDYY | 215 | DIQMTQSSSYLSVSLGGRVTITCKASDHINNWL | 515 |
| | MSWVRQPPGKALEWLALTRNKAHGYTTEYSASV | | AWYQQKPGNAPRLLISGATSLKTGVPSRFSGSG | |
| | KGRFTISRDNSQSILYLQMNTLRAEDSATYYCA | | SGKDYTLSITSLQTEDVATYYCQQYWSTPFTFG | |
| | RDGGYWGQGTTLTVSS | | SGTKLEIK | |
| SCT-Ga259 | EVNLVESGGGLVQPGGSLRLSCATSGFTFNDYY | 201 | DIQMTQSPSYLSVSLGGRVTINCKASDHINNWL | 543 |
| | MSWVRQPPGKALEWLCLIRNKANGYTTEYSASV | | AWYQQKPGNAPRLLISGATSLETGVPSRFSGSG | |
| | KGRFTISRDNSQSILYLQMNTLRAEDSATYYCA | | SGKDYTLSITSLQTEDAATYYCQQYWSIPFTFG | |
| | RDGGYWGQGTTLTVSS | | SGTKLEIK | |
| SCT-Ga260 | EVNLVESGGGLVQPGGSLRLSCATSGFTFNDYY | 216 | DIQMTQSSSYLSVSLGGRVTITCKASDHINNWL | 527 |
| | MAWVRQPPGKALEWLCLIRDKANGYTTEYSASV | | AWYQQKPGNAPRLLISGATSLGAGVPSRFSGSG | |
| | KGRFTISRDNSQSILYLQMNTLRAEDSATYYCA | | SGKDYTLSITSLQTEDVATYYCQQYWSIPFTFG | |
| | RDGGYWGQGTTLTVSS | | SGTKLEIK | |
| SCT-Ga261 | EVQLQQSGPELEKPGSSVKISCKASGYSFSDYN | 217 | QIVLTQSPAIMSASPGEKVTMTCSASSSVTYMY | 544 |
| | MHWVKQSNGKSLEWIGNIDVYYLSTSYNQKFKG | | WYQQKSGSSPRLLIYDTSNLASGVPVRFSGSGS | |
| | KATLTVDRSSSTAYMQLKSLTSEDSAVYFCARS | | GTSYSLTISRMEAEDAATYYCQHWSSYPLTFGA | |
| | LLRWYFDVWGAGTTVTVSS | | GTKLELK | |
| SCT-Ga262 | EVQLQQSGPELVKPGASMKISCKASGYSFTGYT | 218 | DWVTQTPLSLPVSFGDQVSISCRSSQSLANSY | 482 |
| | MNWVKQSHGKNLEWIGLIIPYNGGTSYNQKFKG | | GNTYLSWYLHKPGQSPQLLIYGISNRFSGVPDR | |
| | KATLTVDKSSSTAYMELLSLTSEDSAVYFCARS | | FSGSGSGTDFTLKISTIKPEDLGMYYCLQGTHQ | |
| | LRFSFDYWGQGTSLTVSS | | PPTFGGGTKLEIK | |
| SCT-Ga263 | QVQLQQPGSELVRPGASVKLSCKASGYTFTSYW | 219 | DIVLTQSPATLSVTPGDSVSLSCRASQSIRNNL | 545 |
| | IHWVKQRHGQGLEWIGNIFPGSGTTNYDEKFKS | | HWFQQKSHESPRLLIKYVSQSISGIPSRFSGSG | |
| | RGTLTVDTSSSTAYMHLSSLTSEDSAIYYCTRE | | SGTDFTLNINSLEAEDFGMYFCQQSISWPYTFG | |
| | GLYSFDYWGQGTTLTVSS | | GGTKLEIK | |
| SCT-Ga264 | QVQLQQPGSELVRPGASVKLSCKASGYTFTSYW | 220 | DIVLTQSPATLSVTPGDSVSLSCRASQSIRNSL | 546 |
| | MHWVKQRHGQGLEWIGNIFPGSGITNYDEKFKN | | HWFQQKSHESPRLLINYASQSMSGIPSRFRGSG | |
| | KGTLTVDTSSSTAYMHLSSLTSEDSAVYYCARE | | SGTDFTLSINSLETEDFGMYFCQQTNSWPYTFG | |
| | GLYAFDYWGQGTTLTVSS | | GGTKLEIK | |
| SCT-Ga265 | QAYLQQSGAELVRSGASVKMSCKASGYTFTSYN | 221 | DIVMTQSQKFMSTSIGDRVSVTCKASQNWTNV | 547 |
| | MHWVKQTPGQGLEWIGKIFPGNGFTDYNQRFRD | | AWYQQRPGQSPKALIYSASYRYSGVPDRFAGSG | |
| | KATLTADTSSSTAYMQISNLTSEDSAVYFCTRE | | SGTDFTLTISNVQSEDLADYFCQQHNSYPYTFG | |
| | GWLSLGYWGQGTTLTVSS | | GGTKLEIK | |
| SCT-Ga266 | EVQLQQSGPELVKPGASMKISCKASGYSFTGYT | 183 | DVWTQTPLSLPVSFGDQVSISCRSSQSLANSY | 548 |
| | MNWVKQSHGKNLEWIGLIVPYNGGTSYNQKFKG | | GTTYLSWYLHKPGQSPQLLIYGISNRFSGVPDR | |
| | KATLTVDKSSSTAYMELLSLTSEDSAVYYCARS | | FSGSGSGTDFTLRISTIKPEDLGMYYCLQGTHQ | |
| | LRFSFDYWGQGTTLTVSS | | PPTFGGGTKLEIK | |
| SCT-Ga267 | EVQLQQSGPELVKPGASMKTSCKASGYSFTGYT | 222 | DVWTQTPLSLPVSFGDQVSISCRSSQSLANSY | 469 |
| | MNWVKQSHGKNLEWIGLIVPNNGGTSYNQKFKG | | GTTYLSWYLHKPGQSPQLLIYGISNRFSGVPDR | |
| | KATLTVDKSSSTAYMELLSLTSEDSAVYYCARS | | FSGSGSGTDFTLKISTIKPEDLGMYYCLQGTHQ | |
| | LRFSFDYWGQGTTLTVSS | | PPTFGGGTKLEIK | |
| SCT-Ga268 | QIQLVQSGPELKKPGETVKISCKASGYIFTNYG | 223 | DIVMTQAAFSNPVTLGTSASISCRSSKNLLHSN | 549 |
| | MNWVKKAPGKGLKWMGWINSYTGESTYGDDFKG | | GITYLYWYLQRPGQSPQLLIYRMSNLASGVPNR | |
| | RFAFSSETSASTAYLQINNLKKEDTATYFCARD | | FSGSGSGTDFTLRISRVEAEDVGVYYCGQLLEL | |
| | SFAYWGQGTLVTVSA | | PYTFGGGTKLEIK | |
| SCT-Ga269 | QAYLQQSGAELVRSGASVKMSCKASGYTFTSYN | 224 | DIVMTQSQKFMSTSIGDRVSVTCKASQNWTNV | 550 |
| | MHWVKQTPGQGLEWIGKIFPGNGFTDYNQIFRD | | AWYQQKPGQSPKALIYSASYRYSGVPDRFTGSG | |
| | KATLTADTSSSTAYMQISSLTSEDSAVYFCTRE | | SGTDFTLTINNVQSEDLADYFCQQHNSYPYTFG | |
| | GWLSLGYWGQGTTLTVSS | | GGTKLEIK | |
| SCT-Ga270 | QVQLQQPGAELVKPGASVKMSCKASGYTFTTFW | 225 | DILLTQSPAILSVSPGERVSFSCRASQSIGTSI | 551 |
| | TNWVKQRPGQGLEWTGDTFPGRGITNYNGKFKN | | QWYQQRTMGSPRLLIKYGSESISGIPSRFSGSG | |
| | KATLTLDTSSSTAYMQLSSLTSEDSAVYYCSRG | | SGTDFTLSINSVESEDSADYYCQQSYRWPYTFG | |
| | LGYFDVWGAGTTVTVSS | | GGSKLEIK | |
| SCT-Ga271 | EVNLVESGGGLVQPGGSLRLSCATSGFTFNDYY | 226 | DIQMTQSSSYLSVSLGGRVTITCKASDHINNWL | 552 |
| | MSWVRQPPGKALEWLCLIRDKANGYTTEYSASV | | AWYQQKPGNAPRLLISGATSLETGVPSRFSGSG | |
| | KGRFTISRDNSQSILYLQMNTLRAEDSATYYCA | | SGKDYTLSITSLQTEDVATYYCQQYWSIPFTFG | |
| | RDGGYWGQGTTLTVSS | | SGTKLEIK | |
| SCT-Ga272 | QVQLQQPGSELVRPGASVKLSCKASGYTFTSYW | 227 | DIVLTQSPATLSVTPGDSVSLSCRASQNIRNNL | 529 |
| | MHWVKQRHGQGLEWIGNIFPGTGSTNYDERFKN | | HWFQQKSHESPRLLIKYASQSISGIPSRFSGSG | |
| | KGTLTVDTSSSTAYMHLSSLTYEDSAVYYCTRE | | SGTDFTLSINSLETEDFGMYFCQQSNSWPYTFG | |
| | GLYPFDYWGQGTTLTVSS | | GGTKLEIK | |
| SCT-Ga273 | EVQLQQSGPELVKPGASMKISCKASGYSFTGYT | 151 | DVWTQTPLSLPVSFGDQVSISCRSSQSLTNSY | 553 |
| | MNWVKQSHGKNLEWIGLIIPYNGGTSYNQKFKD | | GNTFLSWYLHKPGQSPQLLIYGISNRFSGVPDR | |
| | KATLTIDKSSSTAYMELLSLTSEDSAVYYCARG | | FSGSGSGTNFTLKISTIKPEDLGMYYCLQGTHQ | |
| | FRGYFAVDYWGQGTSVTVSS | | PWTFGGGTKLEIK | |
| SCT-Ga274 | EVQLQQSGPELEKPGSSVKISCKASGYSFTDYN | 228 | EIVLTQSPAIMSASPGEKVTMTCSAGSSVSSSY | 554 |
| | MHWVKQSNGKSLEWIGNIDVYYSGTSYNQKFRG | | LHWYQQKSGSSPRLLIYDTSNLASGVPVRFSGS | |
| | KATLTVDKSSSTAYMELKSLTSEDSAVYFCARS | | GSGTSYSLTISPMEAEDAATYYCQQWSSYPLTF | |
| | LLRWYFDVWGAGTTVTVSS | | GAGTKLELK | |
| SCT-Ga275 | EVMLVESGGGLVKPGGSLKLSCAASGFTFSTYA | 229 | NIMMTQSPSSLAVSAGEKVTMSCKSSQSVLYSS | 555 |
| | MSWVRQTPEKRLEWVATISSGGSYTYYPDSVKG | | NQMNYLAWYQQKPGQSPKLLIYWASTRESGVPD | |
| | RFTISRDNAKNTLYLQMSSLRSEDTAMYYCARH | | RFTGSGSGTDFTLTISSVQAEDLALYYCHQYLS | |
| | FISTIITHFDYWGHGTTLTVSS | | SLTFGAGTKLELK | |
| SCT-Ga276 | EVNLVESGGGLVQPGGSLRLSCATSGFTFNDYY | 201 | DIQMTQSSSYLSVSLGGRVTITCKASDHINNWL | 552 |
| | MSWVRQPPGKALEWLCLIRNKANGYTTEYSASV | | AWYQQKPGNAPRLLISGATSLETGVPSRFSGSG | |
| | KGRFTISRDNSQSILYLQMNTLRAEDSATYYCA | | SGKDYTLSITSLQTEDVATYYCQQYWSIPFTFG | |
| | RDGGYWGQGTTLTVSS | | SGTKLEIK | |
| SCT-Ga277 | QVQLQQSGPELVKPGASVKMSCKASGYTFTSYY | 230 | DVLMTQTPLSLPVSLGDQASISCRSSQNIVHSN | 556 |
| | IHWVKQRPGQGLEWIGWIYPGDGSTKYNEKFKG | | GNTYLEWYLQKPGQSPKLLIYKVSNRFSGVPDR | |
| | KTTLTADKSSSTAYMLLSSLTSEDSAIYFCTRD | | FSGSGSGTDFTLKISRVEAEDLGVYYCFQGSHV | |
| | GNYGDWFPYWGQGTLVTVSA | | PYTFGGGTKLEIK | |
| SCT-Ga278 | QVQLQQSGGEVMKPGASVKISCKATGYTFSNYW | 231 | DIQMTQPTSSLSASLGDRVTISCSASQGISSYL | 557 |
| | IEWVKQRPGHGLEWIGEILPVSDSAYYNEKFRG | | NWYQQKPDGTVTLLIYYTSSLHSGVPSRFSGSG | |
| | KATFTADKSSNTAYMQLSTLTSEDSAVYYCARQ | | SGTDYSLTISNLEPEDIATYYCQHYSKLPYTFG | |
| | KYGNYYYFDYWGQGTTLTVSS | | GGTKLEIK | |
| SCT-Ga279 | QVQLQQPGSELVRPGASVKLSCKASGYTFTSYW | 163 | DIVLTQSPASLAVSLGQRASISCRASESVDKYG | 558 |
| | IHWVKQRHGQGLEWIGNIFPGSGTSNYDEKFNN | | ISFMSWFQQKPGQPPKLLIYAASNQGSGVPARF | |
| | KGTLTVDTSSSTSYMHLSSLTSEDSAVYYCARE | | SGSGSGTDFSLNIHPMEEDDTAMYFCQQSKEVP | |
| | GLYAFDYWGQGTTLTVSS | | WTFGGGTKLEIK | |
| SCT-Ga232 | EVQLQQSGPELEKPGSSVKISCKASGYSFTDYN | 177 | EIVLTQSPAIMSASPGEKVTVTCSAGSSVSSSN | 517 |
| | MHWVKQSNGKSLEWIGDIDVYYSGTSYNQKFKG | | LHWYQQKSGSSPRLLIYDTSKLASGVPVRFSGS | |
| | KATLTVDKSSSTTYMELKSLTSEDSAVYFCARS | | GSGTSYALTISRMEAEDAATYYCQQWSSYPLTF | |
| | SLRWYFDLWGAGTTVTVSS | | GAGTKLELK | |
| SCT-Ga233 | QVQLKESGPGLVAPSQSLSITCTVSGFSLTRHG | 140 | NIMMTQSPSSLAVSAGEKVTMSCKSSQNILYSS | 518 |
| | IHWVRQPPGKGLEWLGVIWPGGNTKYNSALMSR | | NQKNYLAWYQQKPGQSPKLLIYWASTRESGVPD | |
| | LSISKDNSKSQVFLKMNSLQTDDTAMYYCARSG | | RFTGSGSGTDFTLTISSVQAEDLAVYYCHQYLS | |
| | GYGNFAPYYFDQWGQGTTLTVSS | | SYTFGGGTKLEIK | |
| SCT-Ga234 | QVQLQQSGGEVMKPGASVKISCQATGYTFSNYW | 195 | DIQMTQTTSSLSASLGDRVTISCSASQGISNYL | 519 |
| | IEWLKQRPGHGLEWTGEILPVSGSSYYNEKFRG | | NWYQQKPDGTVTLLIYYTSSLNSGVPSRFSGSG | |
| | KATFSADKSSNTAYMQLSSLTSEDSAVYYCARQ | | SGTDYSLTISNLEPEDIATYYCQHYSKLPYTFG | |
| | KYGNYYYFDYWGQGTTLTVSS | | GGTKLEMK | |
| SCT-Ga235 | QVQLQQSGGDLMKPGASVKTSCKATGYTFSNYW | 196 | DIQMTQTTSSLSASLGDRVTISCSASQGLSNYL | 520 |
| | IEWVKQRPGHGLEWIGEILPGSGSSYYNEKFKG | | HWYQQKPDGTVKLLIYYTSSLHSGVPSRFSGSG | |
| | KATFTADTSSSTAYMQLSSLTSEDSAVYYCARQ | | SGTDYSLTISNLEPEDIATYYCQQYSKLPYTFG | |
| | KYGNYYYFDFWGQGTSLTVSS | | GGTKLEIK | |
| SCT-Ga236 | QVQLQQPGSELVRPGASVKLSCKASGYTFTSYW | 171 | DIVLTQSPATLSVTPGDSVSLSCRASQSIRNSL | 521 |
| | MHWVKQRHGQGLEWTGNIFPGSGTTNYDEKFKN | | HWFQQKSHESPRLLINYASQSVSGIPSRFRGSG | |
| | KGTLTVDTSSSTAYMHLSSLTSEDSAVYYCARE | | SGTDFTLSINSLETEDFGMYFCQQSNSWPYTFG | |
| | GLYAFDYWGQGTTLTVSS | | GGTKLEIK | |
| SCT-Ga237 | EVMLVESGGGLVEPGGSLKLSCAASGFTFSTYA | 197 | NIMMTQSPSSLAVSAGEKVTMSCKSSQSVLYSS | 522 |
| | MSWVRQTPEKRLEWVATISSGGTYTYYPDSVKG | | NQMNYLAWYQQKPGQSPKVLIYWASTRESGVPD | |
| | RFTISRDNAKNTLYLQMSSLRSEDTAMYYCARH | | RFTGGGSGTDFTLTISSVQAEDLALYYCHQYLS | |
| | FTSTIITHFDYWGHGTTLTVSS | | SLTFGAGTKLELK | |
| SCT-Ga238 | EVQLQQSGTVLARPGASVKMSCKASGYSITSYW | 198 | DVVLTQSPATLSVTPGDSVSLSCRASQTISNNL | 523 |
| | MHWVKQRPGQGLEWTGGVYPGNSNTNYNQKFKG | | HWFQQKSHESPRLLIKYSSQSISGIPSRFSGSG | |
| | KAKLTAVTSASTAYMELSSLTNEDSAVYYCTRE | | SGTDFTLSINSVETEDFGMYFCQQSYSWPYTFG | |
| | GGYGMDYWGQGTSVTVSS | | GGTKLEIK | |
| SCT-Ga239 | QAYLQQSGAELVRSGASVKMSCKASGYTFTSYN | 170 | DIVMTQSQKFMSTSVGDRVSITCKASQNVVTNV | 524 |
| | MHWVKQTPGQGLEWIGKIFPGNGFTDYNQNFRD | | AWYQQKPGQSPKALIYSASYRYSGVPDRFTGSG | |
| | KATLTADTSSSTAYMQISSLTSEDSAVYFCTRE | | SGTDFTLTISNVQSEDLADYFCQQHNSYPYTFG | |
| | GWLSLGYWGQGTTLTVSS | | GGTKLEIK | |
| SCT-Ga240 | QVQLQQPGSELVRPGASVKLSCKASGYTFTSYW | 199 | DIVLTQSPATLSVTPGDSVSLSCRASQNIRNSL | 525 |
| | MHWVKQRHGQGLEWIGNIFPGSGTTNYDEKFKN | | HWFQQKSHESPRLLINYASQSISGIPSRFRGSG | |
| | KGTLTVDTSSNIAYMHLSSLTSEDSAVYYCARE | | SGTDFTLTINSLETEDFGVYFCQQSNSWPYTFG | |
| | GLYAFDYWGQGTTLTVSS | | GGTKLEIK | |
| SCT-Ga241 | QTQLVQSGPELKKPGETVKTSCKASGYTFTDYS | 200 | QIVLSQSPAILSASPGEKVTMTCRASSSVNYMH | 526 |
| | MHWVKQAPGKGLKWMGWINTETGEPTYADDFKG | | WYQQKPGSSPKPWIYATSNLASGVPARFSGSGS | |
| | RFAFSLETSASTAYLQINNLKNEDTATYFCTRT | | GTSYSLTISRVEAEDAATYYCQQWNFNPQTFGG | |
| | NYGNPYWYFDVWGAGTTVTVSS | | GTKLEIK | |
| SCT-Ga242 | EVNLVESGGGLVQPGGSLRLSCATSGFTFNDYY | 201 | DIQMTQSSSYLSVSLGGRVTITCKASDHINNWL | 527 |
| | MSWVRQPPGKALEWLCLIRNKANGYTTEYSASV | | AWYQQKPGNAPRLLISGATSLGAGVPSRFSGSG | |
| | KGRFTISRDNSQSILYLQMNTLRAEDSATYYCA | | SGKDYTLSITSLQTEDVATYYCQQYWSIPFTFG | |
| | RDGGYWGQGTTLTVSS | | SGTKLEIK | |
| SCT-Ga243 | EVQLQQSGPELVKPGASMKISCKASGYSFIDYI | 202 | DWLTQTPLSLPVSLGDQVSISCRSSQSLTNSY | 528 |
| | MNWVKQSHGKNLEWIGLIIPYNGGTSYNQKFKG | | GSTFLSWYLHKPGQSPQLLIYGISNRFSGVPDR | |
| | KATLTVDKSSSTASMEFLSLTSEDSAVYYCARG | | FSGSGSGTDFTLKISTVKPEDLGMYYCLQGTHQ | |
| | LRGYYAMDYWGQGTSVTVSS | | PWTFGGGTKLEIK | |
| SCT-Ga244 | QVQLQQPGSELVRPGASVKLSCKASGYTFTSYW | 203 | DIVLTQSPATLSVTPGDSVSLSCRASQNIRNNL | 529 |
| | MHWVKQRHGQGLEWIGNIFPGTGSANYDERFKN | | HWFQQKSHESPRLLIKYASQSISGIPSRFSGSG | |
| | KGTLTVDTSSSTAYMHLSSLTYEDSAVYYCTRE | | SGTDFTLSINSLETEDFGMYFCQQSNSWPYTFG | |
| | GLYPFDYWGQGTTLTVSS | | GGTKLEIK | |
| SCT-Ga245 | QVQLKQSGPGLVQPSQSLSITCTVSGFSLTSYG | 204 | QIVLTQSPAIMSASLGERVTMTCTASSSVISSY | 530 |
| | VHWVRQSPGKGLEWLGVIWSGGSTDYNAAFISR | | LHWYQQKPGSSPKLWIYSTSNLASGVPARFSGS | |
| | LSISKDNSKSQVFFKMNSLQTNDTAIYYCAREV | | GSGTSYSLTISSMEAEDAATYYCHQYHRSPLTF | |
| | RRYFDVWGAGTTVTVSS | | GAGTKLELK | |
| SCT-Ga246 | QITLKESGPGIVQPSQPFRLTCTFSGFSLSTSG | 205 | DVLMTQSPLSLPVSLGDQASISCRSSQSIVHSD | 531 |
| | IGVTWIRQPSGKGLEWLATIWWDDDNRYNPSLK | | GNTYLEWYLQKPGQSPKLLIYKVSRRFSGVPDR | |
| | SRLTVSKDTSNNQVFLNIIALETADTAMYYCAQ | | FSGSGSGTDFTLKISRVGAEDLGVYYCFQGSHV | |
| | SGGITLMDYWGQGTSVTVSS | | PGTFGGGTKLEIK | |
| SCT-Ga247 | EVQLQQSGPELVRPGGSMKISCKASGYSFTGYT | 206 | DVVMTQTPLSLPVSFGDQVSISCRSSQNLTNSY | 532 |
| | MNWVKQSHGQNLEWIGLIIPYNGGSSYNQKFQG | | GNTYLSWYLHKPGQSPQLLIYGISNRFSGVPDR | |
| | KATLTVDKSSSTAYMELLSLTSEDSAVFYCARG | | FSGSGSGTDFTLKISTIKPEDLGMYYCLQGTHQ | |
| | LRGYFAMDYWGQGTSVTVSS | | PWTFGGGTKLEIK | |
| SCT-Ga248 | QAYLQQSGAELVRSGASVKMSCKASGYTFTSYN | 207 | QIVLTQSPAIMSASPGEKVTMTCSASSSVNYMH | 533 |
| | LHWVKQTPGQGLKWIGYIYPGNGYTHYNQKFKG | | WYQQKSGTSPKRWIYDTSKLASGVPARFSGSGS | |
| | KATLTADTSSSTAYMQINSLTSEDSAVYFCARE | | GTSYSLTISSMEAEDAATYYCQQWNSNPPTFGA | |
| | GGWAMDYWGQGTSVTVSS | | GTKLELK | |
| SCT-Ga249 | QVQLQQSGGELMKPGASVKISCKATGYTFSNYW | 208 | AIQMTQTTSSLSASLGDRVTISCSASQGIGNYL | 534 |
| | IEWVKQRPGHGLEWIGEILPGSGSSYYNEKFKG | | NWYQQKPDGTVKLLIYYTSSLHSGVPSRFSGSG | |
| | RATFTADKSSNTAYMQLSSLTSEDSAVYYCARQ | | SGTDYSLTISDLEPEDIATYYCHQYSKLPYTFG | |
| | KYGNFYYFDFWGQGTTLTVSS | | GGTKLEIK | |
| SCT-Ga250 | QIQLVQSGPELKKPGETVKISCKASGYTFTNYG | 209 | DIVMTQAAFSNPVTLGTSASISCRSSKNLLHSN | 535 |
| | MNWVKQAPGKGLKWMGWISTYIGEPTCADDFKG | | GITYLYWYLQRPGQSPQLLIYRVSNLASGVPNR | |
| | RFAFSLDTSASTAYLQINNLKNEDTATYFCARD | | FSGSESGTDFTLRISRVEAEDVGVYYCGQLLEL | |
| | SFAHWGQGTLVTVSA | | PYTFGGGTKLEIK | |
| SCT-Ga251 | QAYLQQSGAELVRSGASVKMSCKASGYTFTSYN | 210 | QIVLTQSSAIMSASPGEKVTMTCSATSSVSSMH | 536 |
| | LHWVKQTPGQGLKWIGYIYPGNGYTNYNQKFKG | | WYQQKSGTSPKRWIYDTSKLASGVPARFSGSGS | |
| | KATLTADTSSSTAYMQTNSLTSEDSAVYFCARE | | GTSYSLTISSMEAEDAATYYCQQWSSNPSTFGA | |
| | GGWAMDYWGQGTSVTVSS | | GTKLELK | |
| SCT-Ga252 | QVQLQQPGSELVRPGASVKLSCKASGYTFTSFW | 211 | DIVLTQSPATLSVTPGDSVSLSCRASQSIRSSL | 537 |
| | MHWVKQRHGQGLEWTGNIYPGSGTTNFDEKFKS | | HWFQQKSHESPRLLITYASQSISGIPSRFSGSG | |
| | KVTLTVDTSSSTAFMHLSSLTSEDSAVYYCTRE | | SGTDFTLSINSLETEDFGVYFCQQSNTWPYTFG | |
| | GLYAFDQWGQGTTLTVSS | | GGTKLEIK | |
| SCT-Ga253 | QVQLQQPGSELVRPGASVKLSCKASGYTFTSYW | 171 | DIVLTQSPATLSVTPGDSVSLSCRASQSIRNSL | 538 |
| | MHWVKQRHGQGLEWIGNIFPGSGTTNYDEKFKN | | HWFQQKSHESPRLLINYASQSISGIPSRFRGSG | |
| | KGTLTVDTSSSTAYMHLSSLTSEDSAVYYCARE | | SGTDFTLSINSLETEDFGMYFCQQSNSWPYTFG | |
| | GLYAFDYWGQGTTLTVSS | | GGTKLEIK | |
| SCT-Ga254 | QVQLQQSGAELVRPGTSVKISCKASGYTFTIHW | 212 | DVVMTQTPLTLSVTIGQPASISCKSSQSLLDSD | 539 |
| | LGWVRQRPGHGLEWTGDIYPGGGYTNYNEKFKG | | GKTYLNWLLQRPGQSPKRLIYLVSKLDSGVPDR | |
| | KATLTADTSSSTAYMQFSSLTSEDSAVYFCARD | | FTGSGSGTDFTLKISRVEAEDLGVYYCWQGTHF | |
| | YGYDVYAMDYWGQGTSVTVSS | | PRTFGGGTKLEIK | |
| SCT-Ga255 | EVKLVESGGGLVKPGGSLKLSCAASGFAFSSFD | 213 | DIQMNQSPSSLSASLGDTITITCHASQNINVWL | 540 |
| | MSWVRQTPEKRLEWVAVTSSGGSYTFYPDSVKG | | SWYQQKPGNIPKLLIYKASNLHTGVPSRFSGSG | |
| | RFTISRDNARNTLYLQMSSLRSEDTALYFCTRQ | | SGAGFTLTISSLQPEDIATYYCQQGQSYPWTFG | |
| | DYRYPYTMDYWGQGTSVTVSS | | GGTKLEIK | |
| SCT-Ga256 | QVQLQQSGAELVRPGTSVKISCKPSGYIFTNFW | 214 | DIQMTQSPASLSASVGETVTITCRSSENIYSYL | 541 |
| | LGWVKQRPGHGLEWIGDIYPGGGYINYNEKFKG | | AWYQQKQGKSPQLLVYNAKILAEGVPSRFSGSG | |
| | RATLTADTSSSTAYMQLSSLTSEDSAVYFCARS | | SGTQYSLKINSLQPEDFGTYYCQHHYGTPPTFG | |
| | RQLASYAMDYWGQGTSVTASS | | GGTNLEIK | |
| SCT-Ga257 | QTTLKESGPGIVQPSQPFRLTCTFSGFSLSTSG | 182 | DVLMTQTPLSLPVSLGDQASISCRSSQNIVHSN | 542 |
| | IGVTWIRQPSGKGLEWLATIWWDDDTRYNPSLK | | GNTYLEWYLQKPGQSPKLLIYKVSNRFSGVPDR | |
| | SRLTVSKDTSNNQAFLNILTVETADTATYYCAQ | | FSGSGSGTDFTLKISRVEAEDLGVYYCFQTSHV | |
| | SGGITLMDYWGQGTSVTVSS | | PGTFGGGTKLEIK | |
| SCT-Ga258 | EVKLVESGGGLVQPGGSLRLSCATSGFTFTDYY | 215 | DIQMTQSSSYLSVSLGGRVTITCKASDHINNWL | 515 |
| | MSWVRQPPGKALEWLALTRNKAHGYTTEYSASV | | AWYQQKPGNAPRLLISGATSLKTGVPSRFSGSG | |
| | KGRFTISRDNSQSILYLQMNTLRAEDSATYYCA | | SGKDYTLSITSLQTEDVATYYCQQYWSTPFTFG | |
| | RDGGYWGQGTTLTVSS | | SGTKLEIK | |
| SCT-Ga259 | EVNLVESGGGLVQPGGSLRLSCATSGFTFNDYY | 201 | DIQMTQSPSYLSVSLGGRVTINCKASDHINNWL | 543 |
| | MSWVRQPPGKALEWLCLIRNKANGYTTEYSASV | | AWYQQKPGNAPRLLISGATSLETGVPSRFSGSG | |
| | KGRFTISRDNSQSILYLQMNTLRAEDSATYYCA | | SGKDYTLSITSLQTEDAATYYCQQYWSIPFTFG | |
| | RDGGYWGQGTTLTVSS | | SGTKLEIK | |
| SCT-Ga260 | EVNLVESGGGLVQPGGSLRLSCATSGFTFNDYY | 216 | DIQMTQSSSYLSVSLGGRVTITCKASDHINNWL | 527 |
| | MAWVRQPPGKALEWLCLIRDKANGYTTEYSASV | | AWYQQKPGNAPRLLISGATSLGAGVPSRFSGSG | |
| | KGRFTISRDNSQSILYLQMNTLRAEDSATYYCA | | SGKDYTLSITSLQTEDVATYYCQQYWSIPFTFG | |
| | RDGGYWGQGTTLTVSS | | SGTKLEIK | |
| SCT-Ga261 | EVQLQQSGPELEKPGSSVKISCKASGYSFSDYN | 217 | QIVLTQSPAIMSASPGEKVTMTCSASSSVTYMY | 544 |
| | MHWVKQSNGKSLEWIGNIDVYYLSTSYNQKFKG | | WYQQKSGSSPRLLIYDTSNLASGVPVRFSGSGS | |
| | KATLTVDRSSSTAYMQLKSLTSEDSAVYFCARS | | GTSYSLTISRMEAEDAATYYCQHWSSYPLTFGA | |
| | LLRWYFDVWGAGTTVTVSS | | GTKLELK | |
| SCT-Ga262 | EVQLQQSGPELVKPGASMKISCKASGYSFTGYT | 218 | DVVVTQTPLSLPVSFGDQVSISCRSSQSLANSY | 482 |
| | MNWVKQSHGKNLEWIGLIIPYNGGTSYNQKFKG | | GNTYLSWYLHKPGQSPQLLIYGISNRFSGVPDR | |
| | KATLTVDKSSSTAYMELLSLTSEDSAVYFCARS | | FSGSGSGTDFTLKISTIKPEDLGMYYCLQGTHQ | |
| | LRFSFDYWGQGTSLTVSS | | PPTFGGGTKLEIK | |
| SCT-Ga263 | QVQLQQPGSELVRPGASVKLSCKASGYTFTSYW | 219 | DIVLTQSPATLSVTPGDSVSLSCRASQSIRNNL | 545 |
| | IHWVKQRHGQGLEWIGNIFPGSGTTNYDEKFKS | | HWFQQKSHESPRLLIKYVSQSISGIPSRFSGSG | |
| | RGTLTVDTSSSTAYMHLSSLTSEDSAIYYCTRE | | SGTDFTLNINSLEAEDFGMYFCQQSISWPYTFG | |
| | GLYSFDYWGQGTTLTVSS | | GGTKLEIK | |
| SCT-Ga264 | QVQLQQPGSELVRPGASVKLSCKASGYTFTSYW | 220 | DIVLTQSPATLSVTPGDSVSLSCRASQSIRNSL | 546 |
| | MHWVKQRHGQGLEWIGNIFPGSGITNYDEKFKN | | HWFQQKSHESPRLLINYASQSMSGIPSRFRGSG | |
| | KGTLTVDTSSSTAYMHLSSLTSEDSAVYYCARE | | SGTDFTLSINSLETEDFGMYFCQQTNSWPYTFG | |
| | GLYAFDYWGQGTTLTVSS | | GGTKLEIK | |
| SCT-Ga265 | QAYLQQSGAELVRSGASVKMSCKASGYTFTSYN | 221 | DIVMTQSQKFMSTSIGDRVSVTCKASQNVVTNV | 547 |
| | MHWVKQTPGQGLEWIGKIFPGNGFTDYNQRFRD | | AWYQQRPGQSPKALIYSASYRYSGVPDRFAGSG | |
| | KATLTADTSSSTAYMQISNLTSEDSAVYFCTRE | | SGTDFTLTISNVQSEDLADYFCQQHNSYPYTFG | |
| | GWLSLGYWGQGTTLTVSS | | GGTKLEIK | |
| SCT-Ga266 | EVQLQQSGPELVKPGASMKISCKASGYSFTGYT | 183 | DVVVTQTPLSLPVSFGDQVSISCRSSQSLANSY | 548 |
| | MNWVKQSHGKNLEWIGLIVPYNGGTSYNQKFKG | | GTTYLSWYLHKPGQSPQLLIYGISNRFSGVPDR | |
| | KATLTVDKSSSTAYMELLSLTSEDSAVYYCARS | | FSGSGSGTDFTLRISTIKPEDLGMYYCLQGTHQ | |
| | LRFSFDYWGQGTTLTVSS | | PPTFGGGTKLEIK | |
| SCT-Ga267 | EVQLQQSGPELVKPGASMKTSCKASGYSFTGYT | 222 | DVVVTQTPLSLPVSFGDQVSISCRSSQSLANSY | 469 |
| | MNWVKQSHGKNLEWIGLIVPNNGGTSYNQKFKG | | GTTYLSWYLHKPGQSPQLLIYGISNRFSGVPDR | |
| | KATLTVDKSSSTAYMELLSLTSEDSAVYYCARS | | FSGSGSGTDFTLKISTIKPEDLGMYYCLQGTHQ | |
| | LRFSFDYWGQGTTLTVSS | | PPTFGGGTKLEIK | |
| SCT-Ga268 | QIQLVQSGPELKKPGETVKISCKASGYIFTNYG | 223 | DIVMTQAAFSNPVTLGTSASISCRSSKNLLHSN | 549 |
| | MNWVKKAPGKGLKWMGWINSYTGESTYGDDFKG | | GITYLYWYLQRPGQSPQLLIYRMSNLASGVPNR | |
| | RFAFSSETSASTAYLQINNLKKEDTATYFCARD | | FSGSGSGTDFTLRISRVEAEDVGVYYCGQLLEL | |
| | SFAYWGQGTLVTVSA | | PYTFGGGTKLEIK | |
| SCT-Ga269 | QAYLQQSGAELVRSGASVKMSCKASGYTFTSYN | 224 | DIVMTQSQKFMSTSIGDRVSVTCKASQNVVTNV | 550 |
| | MHWVKQTPGQGLEWIGKIFPGNGFTDYNQIFRD | | AWYQQKPGQSPKALIYSASYRYSGVPDRFTGSG | |
| | KATLTADTSSSTAYMQISSLTSEDSAVYFCTRE | | SGTDFTLTINNVQSEDLADYFCQQHNSYPYTFG | |
| | GWLSLGYWGQGTTLTVSS | | GGTKLEIK | |
| SCT-Ga270 | QVQLQQPGAELVKPGASVKMSCKASGYTFTTFW | 225 | DILLTQSPAILSVSPGERVSFSCRASQSIGTSI | 551 |
| | TNWVKQRPGQGLEWTGDTFPGRGITNYNGKFKN | | QWYQQRTMGSPRLLIKYGSESISGIPSRFSGSG | |
| | KATLTLDTSSSTAYMQLSSLTSEDSAVYYCSRG | | SGTDFTLSINSVESEDSADYYCQQSYRWPYTFG | |
| | LGYFDVWGAGTTVTVSS | | GGSKLEIK | |
| SCT-Ga271 | EVNLVESGGGLVQPGGSLRLSCATSGFTFNDYY | 226 | DIQMTQSSSYLSVSLGGRVTITCKASDHINNWL | 552 |
| | MSWVRQPPGKALEWLCLIRDKANGYTTEYSASV | | AWYQQKPGNAPRLLISGATSLETGVPSRFSGSG | |
| | KGRFTISRDNSQSILYLQMNTLRAEDSATYYCA | | SGKDYTLSITSLQTEDVATYYCQQYWSIPFTFG | |
| | RDGGYWGQGTTLTVSS | | SGTKLEIK | |
| SCT-Ga272 | QVQLQQPGSELVRPGASVKLSCKASGYTFTSYW | 227 | DIVLTQSPATLSVTPGDSVSLSCRASQNIRNNL | 529 |
| | MHWVKQRHGQGLEWIGNIFPGTGSTNYDERFKN | | HWFQQKSHESPRLLIKYASQSISGIPSRFSGSG | |
| | KGTLTVDTSSSTAYMHLSSLTYEDSAVYYCTRE | | SGTDFTLSINSLETEDFGMYFCQQSNSWPYTFG | |
| | GLYPFDYWGQGTTLTVSS | | GGTKLEIK | |
| SCT-Ga273 | EVQLQQSGPELVKPGASMKISCKASGYSFTGYT | 151 | DVVVTQTPLSLPVSFGDQVSISCRSSQSLTNSY | 553 |
| | MNWVKQSHGKNLEWIGLIIPYNGGTSYNQKFKD | | GNTFLSWYLHKPGQSPQLLIYGISNRFSGVPDR | |
| | KATLTIDKSSSTAYMELLSLTSEDSAVYYCARG | | FSGSGSGTNFTLKISTIKPEDLGMYYCLQGTHQ | |
| | FRGYFAVDYWGQGTSVTVSS | | PWTFGGGTKLEIK | |
| SCT-Ga274 | EVQLQQSGPELEKPGSSVKISCKASGYSFTDYN | 228 | EIVLTQSPAIMSASPGEKVTMTCSAGSSVSSSY | 554 |
| | MHWVKQSNGKSLEWIGNIDVYYSGTSYNQKFRG | | LHWYQQKSGSSPRLLIYDTSNLASGVPVRFSGS | |
| | KATLTVDKSSSTAYMELKSLTSEDSAVYFCARS | | GSGTSYSLTISPMEAEDAATYYCQQWSSYPLTF | |
| | LLRWYFDVWGAGTTVTVSS | | GAGTKLELK | |
| SCT-Ga275 | EVMLVESGGGLVKPGGSLKLSCAASGFTFSTYA | 229 | NIMMTQSPSSLAVSAGEKVTMSCKSSQSVLYSS | 555 |
| | MSWVRQTPEKRLEWVATISSGGSYTYYPDSVKG | | NQMNYLAWYQQKPGQSPKLLIYWASTRESGVPD | |
| | RFTISRDNAKNTLYLQMSSLRSEDTAMYYCARH | | RFTGSGSGTDFTLTISSVQAEDLALYYCHQYLS | |
| | FISTIITHFDYWGHGTTLTVSS | | SLTFGAGTKLELK | |
| SCT-Ga276 | EVNLVESGGGLVQPGGSLRLSCATSGFTFNDYY | 201 | DIQMTQSSSYLSVSLGGRVTITCKASDHINNWL | 552 |
| | MSWVRQPPGKALEWLCLIRNKANGYTTEYSASV | | AWYQQKPGNAPRLLISGATSLETGVPSRFSGSG | |
| | KGRFTISRDNSQSILYLQMNTLRAEDSATYYCA | | SGKDYTLSITSLQTEDVATYYCQQYWSIPFTFG | |
| | RDGGYWGQGTTLTVSS | | SGTKLEIK | |
| SCT-Ga277 | QVQLQQSGPELVKPGASVKMSCKASGYTFTSYY | 230 | DVLMTQTPLSLPVSLGDQASISCRSSQNIVHSN | 556 |
| | IHWVKQRPGQGLEWIGWIYPGDGSTKYNEKFKG | | GNTYLEWYLQKPGQSPKLLIYKVSNRFSGVPDR | |
| | KTTLTADKSSSTAYMLLSSLTSEDSAIYFCTRD | | FSGSGSGTDFTLKISRVEAEDLGVYYCFQGSHV | |
| | GNYGDWFPYWGQGTLVTVSA | | PYTFGGGTKLEIK | |
| SCT-Ga278 | QVQLQQSGGEVMKPGASVKISCKATGYTFSNYW | 231 | DIQMTQPTSSLSASLGDRVTISCSASQGISSYL | 557 |
| | IEWVKQRPGHGLEWIGEILPVSDSAYYNEKFRG | | NWYQQKPDGTVTLLIYYTSSLHSGVPSRFSGSG | |
| | KATFTADKSSNTAYMQLSTLTSEDSAVYYCARQ | | SGTDYSLTISNLEPEDIATYYCQHYSKLPYTFG | |
| | KYGNYYYFDYWGQGTTLTVSS | | GGTKLEIK | |
| SCT-Ga279 | QVQLQQPGSELVRPGASVKLSCKASGYTFTSYW | 163 | DIVLTQSPASLAVSLGQRASISCRASESVDKYG | 558 |
| | IHWVKQRHGQGLEWIGNIFPGSGTSNYDEKFNN | | ISFMSWFQQKPGQPPKLLIYAASNQGSGVPARF | |
| | KGTLTVDTSSSTSYMHLSSLTSEDSAVYYCARE | | SGSGSGTDFSLNIHPMEEDDTAMYFCQQSKEVP | |
| | GLYAFDYWGQGTTLTVSS | | WTFGGGTKLEIK | |
| SCT-Ga280 | EVQLQQSGPELVKPGASMKISCKASGYSFTGYT | 232 | DVVVTQTPLSLPVSFGDQVSISCRSSQSLANSY | 559 |
| | MNWVKQSHGKNLEWIGLIVPYNGGTSYNQKFKG | | GTTYLSWYLHKPGQSPQLLIYEISNRFSGVPDR | |
| | KATLTVDKSSSTAYMELLSLTSEDSAVYYCARS | | FSGSGSGTDFTLKISTIKPEDLGMYYCLQGTHQ | |
| | VRFSFDYWGQGTTLTVSS | | PPTFGGGTKLEIK | |
| SCT-Ga281 | QIQLVQSGPELQKPGETVKISCKASGYTFTNYG | 233 | DIVMTQAAFSNPVTLGTSASISCRSSKNLLHSN | 466 |
| | MNWVKKAPGKGFKWMGWINTYTGESTYADDFKG | | GITYLYWYLQRPGQSPQVLIYRMSNLASGVPNR | |
| | RFAFSSETSASTVFLQINNLKNEDTATYFCARD | | FSGSGSGTDFTLRISRVEAEDVGVYYCGQLLEL | |
| | SFAYWGQGTLVTVSA | | PYTFGGGTKLEIK | |
| SCT-Ga282 | EVQLQQSGPDLVKPGASVKISCKASGYSFTGYY | 234 | DIWTQSPASLAVSLGQRATISCRASESVDSYG | 560 |
| | MHWVKQSHGKSLEWIGRVNPNNGGTSYNQKFKD | | KSFIHWYQQKPGQPPKLLIYVASNLESGVPARF | |
| | KAVLTVDKSSSTAYMEFRSLTSEDSAVYYCASS | | SGSGSRTDFTLTIDPVEADDAATYYCQQNNEDP | |
| | PLLRLRGYAMDDWGQGTSVTVSS | | WTFGGGTKLEIK | |
| SCT-Ga283 | QVQLQQPGAELVKPGASVKMSCKASGYTFTSFW | 235 | DILLTQSPAILSVSPGERVSFSCRASQSIGTSI | 561 |
| | INWVKQRPGQGLEWIGDIYPGRGITNYNGEFKS | | QWYQQRTNGSPRLLIKYGSESISGIPSRFSGSG | |
| | KATLTLDTSSSTAYMQLSSLTSEDSAVYYCSRG | | SGTDFTLSINSVESEDIADYYCQQSYRWPYTFG | |
| | LGYFDVWGAGTTVTVSS | | GGTKLEIK | |
| SCT-Ga284 | QVQLQQPGSELVRPGVSVKLSCKASGYTFTSYW | 236 | DIVLSQSPATLSVTPGDSVSLSCRASQSIRNNL | 562 |
| | MHWVKQRHGQGLEWIGNIFPGSGTTNYHEKFKN | | HWFQQKSHESPRLLITYASQSISGIPPRFSGSG | |
| | KGTLTVDTSSSTAYMHLSSLTSEDSAVYYCSRE | | SGTDFTLSINSLETEDFGMFFCQQSNSWPYTFG | |
| | GLYPFDYWGQGTTLTVSS | | GGTKLEIK | |
| SCT-Ga285 | QAYLQQSGAELVRSGASVKMSCKASGYTFTSYN | 164 | DIVMTQSQKFMSTSVGDRVSITCKASQHVVTNV | 563 |
| | MHWVKQTPGQGLEWIGKIFPGNGFTDYNQKFRD | | AWYQQKPGQSPKALIYSASYRYSGVPDRFTGSG | |
| | KATLTADTSSSTAYMQISSLTSEDSAVYFCTRE | | SGTDFTLTISNVQSEDLADYFCQQHNSYPYTFG | |
| | GWLSLGYWGQGTTLTVSS | | GGTKLEIK | |
| SCT-Ga286 | QVQLKESGPGLVAPSQSLSITCTVSGFSLTSYD | 237 | DILLTQSPAILSVSPGERVSFSCRASQNIGTSI | 564 |
| | ISWIRQPPGKGLEWLGVIWTGGGTNYNSAFMSR | | HWYQQRTNGSPRLLIKYAFESISGIPSRFSGSG | |
| | LSISKDNSKSQVFLKMNSLQTDDTAIYYCVRST | | SGTDFTLSINSVESEDIADYYCQQSNSWPLTFG | |
| | MITHYAMDYWGQGTSVTVSS | | AGTKLELK | |
| SCT-Ga287 | EVNLVESGGGLVQPGGSLRLSCATSGFTFNDYY | 201 | DIQMTQSSSYLSVSLGGRVTITCRASDHINNWL | 565 |
| | MSWVRQPPGKALEWLCLIRNKANGYTTEYSASV | | AWYQQKPGNAPRLLISGATSLETGVPSRFSGSG | |
| | KGRFTISRDNSQSILYLQMNTLRAEDSATYYCA | | SGKDYTLSITSLQTEDVATYYCQQYWSIPFTFG | |
| | RDGGYWGQGTTLTVSS | | SGTKLEIK | |
| SCT-Ga288 | QITLKESGPGIVQPSQPFRLTCTFSGFSLSTSG | 192 | DIQMTQSSSYLSVSLGGRVTITCKASDHINNWL | 566 |
| | IGVTWIRQPSGKGLEWLATIWWDDDNRYNPSLK | | AWYQQKPGNAPRLLISGATSLKTGVPSRFSGSG | |
| | SRLTVSKDTSNNQAFLNIITVETADTAIYYCAQ | | SGKDYTLSITSLQIEDVATYYCQQYWSIPFTFG | |
| | SGGITLMDYWGQGTSVTVSS | | SGTKLEIK | |
| SCT-Ga289 | QVQLQQPGSELVRPGASVKLSCKASGYTFTSYW | 238 | DIVLTQSPATLSVTPGDSVSLSCRASQSIRNSL | 567 |
| | MHWVKQRHGQGLEWIGNIYPGSGTTNYDEKFKN | | HWFQQKSHESPRLLIKYVFQSISGIPSRFSGSG | |
| | KGTLTVDTSSSTAYIHLSSLTSEDSAVYYCTRE | | SGTDFTLSINSLETEDFGMYFCQQSNSWPYTFG | |
| | GLYPFDYWGQGTTLTVSS | | GGTKLEIK | |
| SCT-Ga290 | QAYLQQSGAELVRSGASVKMSCKASGYTFTSYN | 210 | QIVLTQSPAIMSASPGEKVTMTCSATSSVSSMH | 568 |
| | LHWVKQTPGQGLKWIGYIYPGNGYTNYNQKFKG | | WYQQKSGTSPKRWIYDTSKLASGVPGRFSGSGS | |
| | KATLTADTSSSTAYMQINSLTSEDSAVYFCARE | | GTSYSLTISSMEAEDAATYYCQQWSSNPSTFGA | |
| | GGWAMDYWGQGTSVTVSS | | GTKLELK | |
| SCT-Ga291 | QVQLQQPGSELVRPGASVKLSCKASGYTFTSYW | 239 | DIVLTQSPATLSVTPGDSVSLSCRASQSIRNSL | 569 |
| | MHWVKQRHGQGLEWIGNIFPGSGITNYDEKFKN | | HWFQQKSLESPRLLINYASQSISGIPSRFRGSG | |
| | KGTLTVDTSSNTAYMHLSSLTSDDSAVYYCARE | | SGTDFTLSINNLETEDFGMYFCQQTNSWPYTFG | |
| | GLYAFDYWGQGTTLTVSS | | GGTKLEIK | |
| SCT-Ga292 | EVQLQQSGPELEKPGSSVKISCTASGFSFTDYN | 240 | EIVLTQSPAIMSASPGEKVTVTCSAGSSVSSSN | 517 |
| | IHWVKQSNGKSLEWIGDVDIYYSGTSYNQKFKG | | LHWYQQKSGSSPRLLIYDTSKLASGVPVRFSGS | |
| | KATLTVDKSSSTTYMELKSLTSEDSAVYFCARS | | GSGTSYALTISRMEAEDAATYYCQQWSSYPLTF | |
| | SLRWYFDLWGAGTTVTVSS | | GAGTKLELK | |
| SCT-Ga293 | QVQLQQPGAELVKPGASVKMSCKASGYTFSNYW | 241 | DIVLTQSPATLSVTPGDSVSLSCRASQSIRNNL | 570 |
| | MHWVKQRPGQGLEWIGTIDPSDSYTSYNPKFKG | | HWYQQKSHESPRLLIKYASQSISGIPSRFSGSG | |
| | KATLTVDPSSSTAYMQLSSPTSEDSAVYYCTRP | | SGTNFTLSINSVETEDFGMYFCQQSYSWPYTFG | |
| | SSYFFDYWGQGTTLTVSS | | GGTKLEIN | |
| SCT-Ga294 | QAYLQQSGAELVRSGASVKMSCKASGYTFTSYN | 242 | DIVMTQSQKFMSTSVGDRVSVTCKASQNVVTNV | 571 |
| | MHWVRQTPGQGLEWIGSIYPGNDGTNYIQKFKG | | AWYQQKPGQSPKPLIYSASYRNSGVPDRFTGSG | |
| | KATLTTDTSSSTAYMQISSLTSEDSAVYFCARE | | SGTDFTLTISNVQSEDLAEYFCQQYKSYPYTFG | |
| | GWLSLDYWGQGTTLTVSS | | GGTKLEIK | |
| SCT-Ga295 | EVQLQQSGPELVKPGASMKISCKASGYSFTGNT | 243 | DVVVTQTPLSLPVSFGDQVSISCRSSQSLANSY | 572 |
| | MNWVKQSHEKNLEWIGLINPYNGGTSYNQKFKG | | GNTYLSWYLHKPGQSPQLLIYGISNRFSGVPDR | |
| | KATLTVDKSSSTAYMELLSLTSEDSAVYYCARG | | FSGSGSGTDFTLKISTIKPEDLGMYYCLQGTHQ | |
| | FRGYFAMDYWGQGTSVTVSS | | PWTFGGGTKLEIK | |
| SCT-Ga296 | QITLKESGPGIVQPSQPFRLTCTFSGFSLSTSG | 182 | DVLMTQTPLSLPVSLGDQASISCRSSQNIVHSN | 573 |
| | IGVTWIRQPSGKGLEWLATIWWDDDTRYNPSLK | | GNTYLEWYLQKPGQSPKLLIYKVSKRFSGVPDR | |
| | SRLTVSKDTSNNQAFLNILTVETADTAIYYCAQ | | FSGSGSGTDFTLKISRVEAEDLGVYYCFQTSHV | |
| | SGGTTLMDYWGQGTSVTVSS | | PGTFGGGTKLEIK | |
| SCT-Ga297 | EVQLQQSGPELVKPGASVKISCKASGYTFTDYN | 244 | DIVLTQAAFSNPVTLGTSVSISCRSSKNLLHSN | 574 |
| | MHWVKQSHGKSLEWIGYIYPYNVGTAYNQKFKG | | GITYLYWHLQRPGQSPQLLIYRVSNLASGVPNR | |
| | KATLTVDNSSSTAYMELRSLTSEDSAVYYCARK | | FSGSESGTDFTLRISRVEAEDVGVYYCAQLLEL | |
| | NPLDYWGQGTTLTVSS | | PYTFGGGTKLEIK | |
| SCT-Ga298 | QVQLQQSGGELMKPGASVKTSCKATGYTFSNCW | 245 | DIQMTQTTSSLSASLGDRVTISCSASQGISNYL | 575 |
| | IEWVKQRPGHGLEWTGEILPGSGSAYYNEKFKG | | NWYQQKPDGTVKLLIYYTSSLHSGVPSRFSGSG | |
| | KATFTADKSSNTAYMQLSSLTSEDSAVYYCARQ | | SGTDYSLTISNLEPEDIATYYCQHYSKLPYTFG | |
| | KYGNYYYFDYWGQGTTLTVSS | | GGTKLEIK | |
| SCT-Ga299 | EVQLQQSGTVLARPGASVKMFCKASGYSFTSYW | 246 | DIVLTQSPATLSVTPGDSVSLSCRASQSIRNNL | 576 |
| | MHWVKQRPGQGLEWIGAFYPGNSATNYNQKFKG | | HWYQQKSHESPRLLIKYSSQSISGIPSRFSGSG | |
| | KAKLTAVTSASTAYMELSSLTNEDSAVYYCSRE | | SGTDFTLSINSVETEDFGMYFCQQSNSWPYTFG | |
| | GGYGMDHWGQGASVTVSS | | GGTKLEIN | |
| SCT-Ga300 | QVQLQQSGPELVKPGASVKMSCKASGYTFTSYY | 230 | DIVLTQSPASLAVSLGQRATISCRASQSVSTSR | 577 |
| | IHWVKQRPGQGLEWIGWIYPGDGSTKYNEKFKG | | YSYMHWYQQKPGQSPKLLIKYASNLESGVPARF | |
| | KTTLTADKSSSTAYMLLSSLTSEDSATYFCTRD | | SGSGSGTDFTLNINPVEEEDTATYYCQHSWEIP | |
| | GNYGDWFPYWGQGTLVTVSA | | LTFGAGTKLELK | |
| SCT-Ga301 | EVKLVESGGGLVKPGGSLKLSCAASGFAFSSFD | 247 | DIQMNQSPSSLSASLGDTITITCHASQNINVWL | 540 |
| | MSWVRQTPEKRLEWVAVISSGGSYTFYPDSVKG | | SWYQQKPGNIPKLLIYKASNLHTGVPSRFSGSG | |
| | RFTISRDNARNTLYLQMSSLRSEDTALYYCARQ | | SGAGFTLTISSLQPEDIATYYCQQGQSYPWTFG | |
| | DYRYPYTMDYWGQGTSVTVSS | | GGTKLEIK | |
| SCT-Ga302 | EVQLQQSGTVLARPGASVKMFCKASGYSFTSYW | 246 | DIVLTQSPATLSVTPGDSVSLSCRASQSIRNNL | 578 |
| | MHWVKQRPGQGLEWTGAFYPGNSATNYNQKFKG | | HWYQQKSHESPRLLIKYASQSISGIPSRFSGSG | |
| | KAKLTAVTSASTAYMELSSLTNEDSAVYYCSRE | | SGTDFTLSINSVETEDFGMYFCQQSNSWPYTFG | |
| | GGYGMDHWGQGASVTVSS | | GGTKLEIN | |
| SCT-Ga303 | EVQLQQSGPELVKPGASMKISCKASGYSFTGYT | 248 | DVVVTQTPLSLPVSFGDQVSISCRSSQSLANSY | 482 |
| | MNWVKQSHGKNLEWIGLIIPYNGGTSYNQKFKG | | GNTYLSWYLHKPGQSPQLLIYGISNRFSGVPDR | |
| | KATLTVDKSSSTAYMELLSLTSEDSAVYYCARS | | FSGSGSGTDFTLKISTIKPEDLGMYYCLQGTHQ | |
| | LRFSFDYWGQGTSLTVSS | | PPTFGGGTKLEIK | |
| SCT-Ga304 | QAYLQQSGAELVRSGASVKMSCKASGYTFSNYN | 249 | QIVLTQSPEIMSASPGEKVTMTCSASSSVSHMH | 579 |
| | MHWVKQTPGQGLEWIGYIFPGNGVTTYSQKFKD | | WYQQKSGTSPKRWIYDTSKLASGVPARFSGSGS | |
| | KATLTADTSSSTAYMQISSLTSEDSAVYFCARG | | GTSYSLTISSMEAEDSATFYCQQWNNNPLTFGA | |
| | GFGGALDYWGQGTSVTVSS | | GTKLELK | |
| SCT-Ga305 | EVQLQQSGTVLARPGASVKMSCKASGYSITSYW | 198 | DWLTQSPATLSVTPGDSVSLSCRASQTISNNL | 580 |
| | MHWVKQRPGQGLEWIGGVYPGNSNTNYNQKFKG | | HWYQQKSHESPRLLIKYSSQSISGIPSRFSGSG | |
| | KAKLTAVTSASTAYMELSSLTNEDSAVYYCTRE | | SGTDFTLSINSVETEDFGMYFCQQSYSWPYTFG | |
| | GGYGMDYWGQGTSVTVSS | | GGTKLEIK | |
| SCT-Ga306 | EVQLQQSGPELVKPGASMKISCKASGYSFTGYT | 173 | DWMTQTPLSLPVSFGDQVSISCRSSQSLANSY | 581 |
| | MNWVKQSHGKNLEWLGLIFPYNSATSYNQKFTG | | GNTYLSWYLHKPGQSPHLLIYGISHRFSGVPDR | |
| | KATITVDKSSNTTYMELLSLTSEDSAVYYCARG | | FSGSGSGTDFTLKISTIKPEDLGMYYCLQGTHQ | |
| | LRGFFALDYWGQGTSVTVSS | | PWTFGGGTKLEIK | |
| SCT-Ga307 | QAYLQQSGAELVRSGASVKMSCKASGYTFSNYN | 250 | QIVLTQSPEIMSASPGEKVTMTCSASSSVSHMH | 582 |
| | MHWVKQTPGQGLEWIGYIFPGNGVTTYSQKFKD | | WYQQKSGTSPKRWIYDTSKLASGVPARFSGSGS | |
| | KATLTADTSSSTAYMQISSLTSEDSAVYFCARG | | GTSYSLTISSMEAEDSATYFCQQWNNNPLTFGA | |
| | GFGGAMDYWGQGTSVTVSS | | GTKLELK | |
| SCT-Ga308 | QITLKESGPGIVQPSQPFRLTCTFSGFSLSTSG | 251 | DVLMTQTPLSLPVSLGDQASISCRSSQSIVHSD | 583 |
| | IGVTWIRQPSGKGLEWLATIWWDDDNRYNPSLK | | GNTYLQWYLQKPGQSPKLLIYKVSRRFSGVPAR | |
| | NRLTVSKDTSNNQAFLNFITVETADTAIYYCAQ | | FSGSGSGTDFTLKISRVEAEDLGVYFCFQGSHV | |
| | SGGITLMDYWGQGTSVTVSS | | PGTFGGGTKLEII | |
| SCT-Ga309 | QITLKESGPGIVQPSQPFRLTCTFSGFSLSTSG | 252 | DVLMTQSPLSLPVSLGDQASISCRSSQSIVHSD | 531 |
| | IGVTWIRQPSGKGLEWLATIWWDDDNRYNPSLK | | GNTYLEWYLQKPGQSPKLLIYKVSRRFSGVPDR | |
| | SRLTVSKDTSNNQVFLNIIDVESADTAMYYCAQ | | FSGSGSGTDFTLKISRVGAEDLGVYYCFQGSHV | |
| | SGGITLMDYWGQGTSVTVSS | | PGTFGGGTKLEIK | |
| SCT-Ga310 | QIQLVQSGPELKKPGETVKISCKASGYTFTNFG | 253 | DIVMTQAAFSNPVTLGTSASISCRSSKNLQHNN | 584 |
| | MNWVKQTPGKGLKWMGWINTYTGEPTYADDLKG | | GITYLYWYLQRPGQSLQLLIYRVSNLASGVPNR | |
| | RFALSLETSAGTSYLQINTLRDEDTATYFCARD | | FSGSESGTDFTLRISRVEPEDVGVYYCGQLLEL | |
| | SFAHWGQGTLVTVSA | | PYTFGGGTRLEIK | |
| SCT-Ga311 | QAYLQQSGAELVRSGASVKMSCKASGYTFTSYN | 254 | QIVLTQSPATMSASPGEKVTMTCSASSSVSHMH | 585 |
| | MHWVKQTPGQGLEWIGYIYPGNGFTNYNQKFKG | | WYQQKSGTSPKRWIYDTSKLASGVPVRFSGSGS | |
| | KATLTADTSSSTAYMQISSLTSEDSAVYFCARE | | GTSYSLTISSMEAEDAATYYCQQWNSNPSTFGA | |
| | GGWAMDYWGQGTSVTVSS | | GTKLELK | |
| SCT-Ga312 | EVNLVESGGGLVQPGGSLRLSCATSGFPFNDYY | 189 | DIQMTQSSSYLSVSLGGRVTITCKASDHIHNWL | 586 |
| | MSWVRQPPGKALEWLCLIRNKANGYTTEYSSSV | | AWYQQKPGNSPRLLISGATSLEAGVPSRFSGSG | |
| | KGRFTISRDNSQSILYLQMNTLRAEDSATYYCA | | SGKDYTLSITSLQTEDVGTYYCQQYWSIPFTFG | |
| | RDGGYWGQGTTLTVSS | | SGTKLEIK | |
| SCT-Ga313 | EVQLQQSGPELVKPGASMKISCKASGYSFTGYT | 255 | DVVVTQTPLSLPVSFGDQVSISCRSSQSLANSY | 482 |
| | MNWVKQSHGKSLEWIGLIIPYNGGTSYNQKFKG | | GNTYLSWYLHKPGQSPQLLIYGISNRFSGVPDR | |
| | KATLSVDKSSSTAYMELLSLTSEDSAVYYCARS | | FSGSGSGTDFTLKISTIKPEDLGMYYCLQGTHQ | |
| | LRFSFDYWGQGTTLTVSS | | PPTFGGGTKLEIK | |
| SCT-Ga314 | QVQLQQPGSELVRPGASVKLSCKASGYTFTSYW | 256 | DIVLTQSPATLSVTPGDSVSLSCRASQSIRNSL | 587 |
| | MHWVKQRHGQGLEWIGNIFPGSGTTNYDEKFKS | | HWFQQKSHESPRLLIKYASQSMSGIPSRFSGSG | |
| | KGTLTVDTSSSTAYMHLSSLTSEDSAVYYCTRE | | SGTDFTLSINSLETEDFGMYFCQQSNSWPYTFG | |
| | GLYAFDYWGQGTTLTVSS | | GGTKLEIK | |
| SCT-Ga315 | EVKLVESGGGLVQPGGS1RLSCATSGFTFTDYY | 257 | DIQMTQSSSYLSVSLGGRVTITCKASDHINNWL | 588 |
| | MSWVRQPPGKALEWLALIRNKANGYTTEYSASV | | AWYQQKPGNAPRLLISGATSLETGVPSRFSGSG | |
| | KGRFTISRDNSQSILYLQMNTLRAEDSATYYCA | | SGKDYILSITRLQTEDVATYYCQQYWSTPFTFG | |
| | RDGGYWGQGTTLTVSS | | SGTKLEIK | |
| SCT-Ga316 | QVQLQQPGSELVRPGASVKLSCKASGYTFTSYW | 258 | DLVLTQSPATLSVTPGDSVSLSCRASQSIRNNL | 589 |
| | MHWVKQRHGQGLEWIGNIYPGGGTTNYDEKFRN | | HWFQQKSHESPRLLITYVSQSISGIPSRFSGSG | |
| | KATLTVDTSSSTAYMHLSSLTSEDSAVYYCTRE | | SGTDFTLSINSLETEDFGMYFCQQSNSWPYTFG | |
| | GLYPFDYWGQGTTLTVSS | | GGTKLEIK | |
| SCT-Ga317 | EVQLQQSGTVLARPGASVKMSCKTSGYSFTSYW | 259 | DIVLTQSPATLSVTPGDSVSLSCRASQSIYNNL | 590 |
| | MHWVKQRPGQGLEWIGGIYPGNSDTTYNQKFKG | | HWYQQKSHESPRLLIKFSSQSISGIPSRFSGSG | |
| | KAKLTAVTSASTAYMELSSLTNEDSAVYYCTRE | | SGTDFTLNINSVETEDFGMYFCQQSNSWPYTFG | |
| | GGYGMDYWGQGTSVTVSS | | GGTKLEIK | |
| SCT-Ga318 | QVQLQQPGSELVRPGASVKLSCKASGYTFTSYW | 260 | DIVLTQSPATLSVTPGDSVSLSCRASQNIRNSL | 591 |
| | IHWVKQRHGQGLEWIGNIFPGSGTSNYDERFKN | | HWFQQKSHESPRLLINYASQSISGIPSRFRGGG | |
| | MGTLTVDTSSNTAYMDLSSLTSEDSAVYYCARE | | SGTDFTLSINSLETEDFGMYFCLQSNSWPYTFG | |
| | GLYAFDYWGQGTTLTVSS | | GGTKLEIK | |
| SCT-Ga319 | QVQLQQSGPELVKPGASMKISCKASGYSFTGYT | 261 | DVVVTQTPLSLPVSFGDQVSISCRSSQSLANSY | 592 |
| | MNWVKQSHGKNLEWIGTINPSNGGTSYNQKFTG | | GNTYLSWYLHKPGQSPQLLIYGISNRFSGVPDR | |
| | KATLTVDKSSTTAYMELLSLTSEDSAVYYCTRR | | FSGSGSGTDFTLKISTIKPEDLGMYFCLQGTHQ | |
| | NYGYYFDYWGQGTTLTVSS | | PLTFGAGTKLELK | |
| SCT-Ga320 | EVKLVESGGGLVQPGGSLRLSCVTSGFTFTDYY | 262 | DIQMTQSSSYLSVSLGGRVTITCKASDHINNWL | 593 |
| | MSWVRQPPGKALEWLALIRNKANGYTTEYSASV | | AWYQQKPGNAPRLLISGATSLKTGVPSRFSGSG | |
| | KGRFTISRDNSQSILYLQMNTLRAEDSATYFCA | | SGKDYILSITSLQTEDVGTYYCQQYWSIPFTFG | |
| | RDGGYWGQGTTLTVSS | | SGTKLEIK | |
| SCT-Ga321 | QITLKESGPGIVQPSQPFRLTCTFSGFSLSTSG | 263 | DVLMTQTPLSLPVSLGDQASISCRSSQSIVHSD | 594 |
| | IGVTWIRQPSGKGLEWLATIWWDDDNRYNPSLK | | GNTYLEWYLQKPGQSPKLLIYKVSRRFSGVPDR | |
| | SRLTVSKDTSNNQAFLNILTVDTADTAIYYCAQ | | FSGSGSGTDFTLKIRRVEAEDLGVYYCFQGSHV | |
| | SGGITLMDYWGQGTSVTVSS | | PGTFGGGTKLEIK | |
| SCT-Ga322 | QVQLQQPGSE’VRPGASVKLSCKASGYTFTSYW | 220 | DIVLTQSPATLSVTPGDSVSLSCRASQSIRNSL | 595 |
| | MHWVKQRHGQGLEWIGNIFPGSGITNYDEKFKN | | HWFQQKSHESPRLLINYASQSISGIPSRFRGSG | |
| | KGTLTVDTSSSTAYMHLSSLTSEDSAVYYCARE | | SGTDFTLIINSLETEDFGMYFCQQSNSWPYTFG | |
| | GLYAFDYWGQGTTLTVSS | | GGTKLEIK | |
| SCT-Ga323 | EVNLVESGGGLVQPGGSLRLSCATSGFPFNDYY | 264 | DIQMTQSSSYLSVSLGGRVTITCKASDHINNWL | 596 |
| | MSWVRQPPGKALEWLCLIRNKAKGYTTEYSSSV | | AWYQQKPGNSPRLLISGATSLGAGVPSRFSGSG | |
| | KGRFTISRDNSQSILYLQMNTLRAEDSATYYCA | | SGKDYTLSITSLQTEDVATYYCQQYWSIPFTFG | |
| | RDGGYWGQGTTLTVSS | | SGTKLEIK | |
| SCT-Ga324 | EVNLVESGGGLVQPGGSLRLSCATSGFPFNDYY | 189 | DIQMTQSSSYLSVSLGGRVTITCKASDHINNWL | 596 |
| | MSWVRQPPGKALEWLCLIRNKANGYTTEYSSSV | | AWYQQKPGNSPRLLISGATSLGAGVPSRFSGSG | |
| | KGRFTISRDNSQSILYLQMNTLRAEDSATYYCA | | SGKDYTLSITSLQTEDVATYYCQQYWSIPFTFG | |
| | RDGGYWGQGTTLTVSS | | SGTKLEIK | |
| SCT-Ga325 | QVQLQQPGAEFVKPGASVRMSCKASGYTFTSFW | 265 | DILLTQSPAILSVSPGERVSFSCRASQNIGTSI | 597 |
| | INWVKQRPGQGLEWIGDIYPGRGIANYNEKFNN | | HWYQQRTSGSPRLLIKSASESISGIPSRFSGSG | |
| | KATLTLDTSSNTAYMQLSSLTSEDSAVYYCSRG | | SGTDFTLSINSVESEDIADYYCQQSNRWPYTFG | |
| | LGYFDVWGAGTTVTVSS | | GGTKLEIK | |
| SCT-Ga326 | QAYLQQSGAELVRSGASVKMSCKASGYTFTSYN | 266 | QIVLTQSPAIMSASPGEKVTMTCSASSSVSQMH | 598 |
| | MHWVKQTPGQGLEWIGYIYPGNGYTNYNQKFKD | | WYQQKSGTSPKRWIYDTSKLASGVPARFSGSGS | |
| | KATLTADTSSSTAYMQISSLTSEDSAVYFCARE | | GTSYSLTLSSMEAEDAATYYCQQWSSNPSTFGV | |
| | GGWAMDYWGQGTSVTVSS | | GTKLELK | |
| SCT-Ga327 | QITLKESGPGIVQPSQPFRLTCTFSGFSLSTSG | 267 | DVLMTQSPLSLPVSLGDQASISCRSSQSIVHSD | 599 |
| | IGVTWIRQPSGKGLEWLATIWWDDDNRYNPSLK | | GNTYLEWYLQKPGQSPKLLIYKVSRRFSGVPDR | |
| | SRLTVSKDTSNNQVFLNIIAVETADTAMYYCAQ | | FSGSGSGTDFTLEISRVGAEDLGVYYCFQASHV | |
| | SGGITLMDYWGQGTSVTVSS | | PGTFGGGTKLEIK | |
| SCT-Ga328 | QVQLQQSGAELVRPGTSVKISCKASGYTFTNFW | 268 | DIKMTQSPSSMYASLGERVTITCKASRDIKSYL | 600 |
| | LGWVKQRPGHGLEWVGDIFPGGGYTNYNEKFKG | | SWYQQKPWKSPKTLIFYATRLADGVPSRFSGSG | |
| | KATLTADTSSSTAYMQLSSLTSEDSAVYFCSRS | | SGQDFSLTISSLESDDTATYYCLHHGESPYTFG | |
| | TMLTGTYWGQGTLVTVSA | | GGTKLEIK | |
| SCT-Ga329 | EVNLVESGGGLVQPGGSLRLSCATSGFTFNDYY | 201 | DIQMTQSSSYLSVSLGGRVTITCKASDHINNWL | 515 |
| | MSWVRQPPGKALEWLCLIRNKANGYTTEYSASV | | AWYQQKPGNAPRLLISGATSLKTGVPSRFSGSG | |
| | KGRFTISRDNSQSILYLQMNTLRAEDSATYYCA | | SGKDYTLSITSLQTEDVATYYCQQYWSTPFTFG | |
| | RDGGYWGQGTTLTVSS | | SGTKLEIK | |
| SCT-Ga330 | QVQLQQSGAELVRPGTSVKISCKASGYTFTNFW | 269 | DIKMTQSPSSMYASLGERVTITCKASQDIKSYL | 601 |
| | LGWVKQRPGHGLEWIGDIFPGGGHTNYNEKFKG | | SWYQQKPWKSPKTLIFYATRLADGVPSRFSGSG | |
| | KATLTADTASSTAYMQLSSLTSEDSAVYFCSRS | | SGQDFSLTISSLESDDTATYYCLHHGESPYTFG | |
| | TILTGAYWGQGTLVTVSA | | GGTKLEIK | |
| SCT-Ga331 | EVKLVESGGGLVQPGGSLRLSCATSGFTFTDYY | 257 | DIQMTQSSSYLSVSLGGRVTITCKASDHINNWL | 506 |
| | MSWVRQPPGKALEWLALIRNKANGYTTEYSASV | | AWYQQKPGNAPRLLISGATSLETGVPSRFSGSG | |
| | KGRFTISRDNSQSILYLQMNTLRAEDSATYYCA | | SGKDYILSITSLQTEDVATYYCQQYWSTPFTFG | |
| | RDGGYWGQGTTLTVSS | | SGTKLEIK | |
| SCT-Ga332 | EVNLVESGGGLVQPGGSLRLSCATSGFTFNDYY | 201 | DIQMTQSSSYLSVSLGGRVTITCKASDHINNWL | 602 |
| | MSWVRQPPGKALEWLCLIRNKANGYTTEYSASV | | AWYQQRPGNAPRLLISGATSLGTGVPSRFSGSG | |
| | KGRFTISRDNSQSILYLQMNTLRAEDSATYYCA | | SGKDYTLSITSLQTEDVATYYCQQYWSIPFTFG | |
| | RDGGYWGQGTTLTVSS | | SGTKLEIN | |
| SCT-Ga333 | QVQLQQSGAELVRPGTSVKVSCKASGYAFTNYL | 270 | DIVMTQSHKFMSTSVGDRVSITCKASQDVSTAV | 603 |
| | IEWVKQRPGQGLEWIGVINPGSGGNNYNEKFKG | | AWYQQKPGQSPKLLIYSASYRYTGVPDRFTGSG | |
| | KATLTADKSSSTAYMQLSSLTSDDSAVYFCARR | | SGTDFTFTISSVQAEDLAVYYCQQHYSSPRTFG | |
| | GDKYGSAWFAYWGQGTLVTVSA | | GGTKLEIK | |
| SCT-Ga334 | EVNLVESGGGLVQPGGSLRLSCATSGFTFNDYY | 271 | DIQMTQSSSYLSVSLGGRVTITCKASDHINNWL | 552 |
| | MSWVRQPPGKALEWLGLIRDKANGYTTEYSASV | | AWYQQKPGNAPRLLISGATSLETGVPSRFSGSG | |
| | KGRFTISRDNSQSILYLQMSTLRAEDSATYYCA | | SGKDYTLSITSLQTEDVATYYCQQYWSIPFTFG | |
| | RDGGYWGQGTTLTVSS | | SGTKLEIK | |
| SCT-Ga335 | EVQLQQSGPELEKPGSSVKISCKASGYSFTDYN | 177 | EIVLTQSPAIMSASPGEKVTVTCSAGSSVNSTY | 604 |
| | MHWVKQSNGKSLEWIGDIDVYYSGTSYNQKFKG | | LHWYQQKSGSSPRLLIYDTSKLASGVPVRFSGS | |
| | KATLTVDKSSSTTYMELKSLTSEDSAVYFCARS | | GSGTSYALTISRMEAEDAATYYCQQWSSYPLTF | |
| | SLRWYFDLWGAGTTVTVSS | | GAGTKLELK | |
| SCT-Ga336 | EVQLQQSGPELVKPGASMKISCKASGYSFTGYT | 183 | DVVVTQTPLSLPVSFGDQVSISCRSSQSLANSY | 469 |
| | MNWVKQSHGKNLEWIGLIVPYNGGTSYNQKFKG | | GTTYLSWYLHKPGQSPQLLIYGISNRFSGVPDR | |
| | KATLTVDKSSSTAYMELLSLTSEDSAVYYCARS | | FSGSGSGTDFTLKISTIKPEDLGMYYCLQGTHQ | |
| | LRFSFDYWGQGTTLTVSS | | PPTFGGGTKLEIK | |
| SCT-Ga337 | EVQLQQSGPELEKPGSSVKISCKASGYSFTDYN | 272 | EIVLTQSPATMSASPGEKVTMTCSASSSVSSSY | 605 |
| | IHWVKQSNGKSLEWIGNIDVYYSSTSYNQKFKG | | LHWYQQKSGSSPRLLIYDTSNLASGVPVRFSGS | |
| | KATLTVDKSSSTAYMQLKSLTSEDSAVYFCARS | | GSGTSYSLTISRMEAEDAATYYCQQWSSYPLTF | |
| | LLRWYFDVWGAGTTVTVSS | | GAGTKLELK | |
| SCT-Ga338 | QVQLQQPGSELVRPGASVKLSCKASGYTFTSYW | 273 | DIVLTQSPATLSVTPGDSVSLSCRASQSIRNNL | 606 |
| | MHWVKQRHGQGLEWIGNIYPGSGTTNYDEKFKN | | HWFQQKSHESPRLLITYASQSISGIPSRFSGSG | |
| | KGTLTVDTSSSTAYMHLSSLTSEDSAVYYCTRE | | SGTDFTLSINSLETEDFGIYFCQQSNSWPYTFG | |
| | GLYPFDYWGQGTTLTVSS | | GGTKLEIK | |
| SCT-Ga339 | EVLLQQSGPELVKPGASVKIPCKASGYTFTDYN | 274 | DIQMTQSSSYLSVSLGGRVTITCKASDHINNWL | 596 |
| | MDWVKQSHGKSLEWIGNINSNNGGAIYNQKFKD | | AWYQQKPGNSPRLLISGATSLGAGVPSRFSGSG | |
| | KATLTVDKSSSTAYMELRSLTSEDTAVYYCARG | | SGKDYTLSITSLQTEDVATYYCQQYWSTPFTFG | |
| | DYYGTTYDYWGQGTTLTVSS | | SGTKLEIK | |
| SCT-Ga340 | EVQLQQSGPELVKPGASMKISCKASGYSFTGYI | 275 | QIVLTQSPAIMSASPGEKVTISCSASSSVSYMY | 607 |
| | MNWVKQSHGKTLEWIGLIHPYNGGTSYNQKFKG | | WYQQKPGSSPKPWIYRTSNMASGVPARFSGSGS | |
| | KATLTVDKSSSTAYMELLSLTSEDSAVYYCARL | | GTSYSLTISSMEAEDAATYYCQQYHGYPPTFGG | |
| | LRYAMDYWGQGTSVTVSS | | GTKLEIK | |
| SCT-Ga341 | QVQLQQSGAELARPGASVKLSCKASGYTFISYW | 276 | DIVMTQSQKFMSTSIGDRVSVTCKASQNVVTNV | 608 |
| | MQWVKQRPGQGLEWIGAIYPGDGDTRYTQKFKG | | AWYQQKPGQSPKALIYSASYRYSGVPDRFTGSG | |
| | KATLTADKSSSTAYMQLSSLASEDSAVYYCARG | | SGTDFTLTISNVQSEDLADYFCQQHNSYPYTFG | |
| | TVGDYWGQGTTLTVSS | | GGTKLEIK | |
| SCT-Ga342 | QIQLVQSGPELKKPGETVKISCKASGYTFTNYG | 277 | DIVMTQAAFSNPVTLGTSASISCRSSKNLLHSN | 466 |
| | MNWVKKAPGKGLKWMVWINTYTGESTYADDFKG | | GITYLYWYLQRPGQSPQVLIYRMSNLASGVPNR | |
| | RFAFSSETSASTAYLQINNLKNEDTATYFCARD | | FSGSGSGTDFTLRISRVEAEDVGVYYCGQLLEL | |
| | SFAYWGQGTLVTVSA | | PYTFGGGTKLEIK | |
| SCT-Ga343 | EVQLQQSGPELVKPGASMKISCKASGYSFTDYT | 278 | DVVVTQTPLSLPVSFGDQVSISCRSSQSLANSY | 609 |
| | MNWVKQSHGKNLEWIGLIIPYNGGTSYNQKFKG | | GVTYLSWYLHKPGQSPQLLIYGISNRFSGVPDR | |
| | KATLTLDKSSSTAYMELLSLTSEDSAVYFCARG | | FSGSGSGTDFTLKISTIKPEDLGMYYCLQGTHQ | |
| | LRGYFAMDYWGRGTSVTVSS | | PWTFGGGTKLEIK | |
| SCT-Ga344 | EVQLQQSGPELVKPGASMKISCKASGYSFTGYT | 279 | DVVVTQTPLSLPVSFGDQVSISCTSSQSLANSY | 610 |
| | MNWVKQSHGKNLEWIGLIFPYNGGTSYNQKFKD | | GNTYLSWYLHKPGQSPQLLIYGISNRFSGVPDR | |
| | KATLTVDKSSSTAYMELLSLTSEDSAVYYCARS | | FSGSGSGTDFTLKISAIKPEDLGMYYCLQGTHQ | |
| | VRFSFDYWGQGTSLTVSS | | PPTFGGGTKLEIK | |
| SCT-Ga345 | EVKLVESGGGLVKPGGSLKLSCAASGFAFSRYD | 280 | DIQMNQSPSSLSASLGDTITITCHASQNINVWL | 611 |
| | MSWVRQTPEKRLEWVATTSSGGSYSFYPDSVKG | | SWYQQKPGNFPKLLIYKTSNLHTGVPSRFSGSG | |
| | RFTISRDNGRNTLYLQMSSLRSEDTALYYCARQ | | SGTGFTLTISNLQPEDIATYYCQQGQSYPWTFG | |
| | DYRYPYIMDYWGQGTSVTVSS | | GGTKLEIK | |
| SCT-Ga346 | EVQLQQSGPELVKPGASMKISCKASGYSFTGYT | 281 | DVVVTQTPLSLPVSFGDQVSISCRSSQSLANSY | 482 |
| | MNWVKQSHGKNLEWTGLINPYNGGTSHNQKFKG | | GNTYLSWYLHKPGQSPQLLIYGISNRFSGVPDR | |
| | KATLTVDKSSSTAYMELLSLTSEDSAVYYCARF | | FSGSGSGTDFTLKISTIKPEDLGMYYCLQGTHQ | |
| | RLWQGMDYWGQGTSVTVSS | | PPTFGGGTKLEIK | |
| SCT-Ga347 | QVQLQQPGSELVRPGASVKLSCKASGYTFTSYW | 282 | DIVLTQSPATLSVTPGDSVSLSCRASPNTRNSL | 612 |
| | MHWVKQRHGQGLEWIGNIFPGSDTTNYDEKFKS | | HWFQQKSHESPRLLISYASQSISGTPSRFSGSG | |
| | KVTLTVDTSSSTVYMHLSSLTSEDSAVYYCTRE | | SGTDFTLSINSLETEDFGMYFCQQSNSWPYTFG | |
| | GLYAFDYWGQGTTLTVSS | | GGTKLEIK | |
| SCT-Ga348 | QVQLQQPGSELVRPGASVKLSCKASGYTFTSYW | 283 | DIVLTQSPAILSVSPGERVSFSCRASQSIGTSI | 613 |
| | MHWVKQRHGQGLEWTGNIFPGSGTTNYDEKFKN | | HWYQQRTNGSPRLLIKFASESISGIPSRFSGSG | |
| | KGTLTVDTSSNTAYMHLSSLTSEDSAVYYCARE | | SGTDFTLSTNSVESEDTGDYYCQQSNSWPYTFG | |
| | GLYAFDYWGQGTTLTVSS | | GGTKLEIK | |
| SCT-Ga349 | QVQLQQPGSELLRPGASVKLSCKASGYTFTSYW | 284 | DTVLTQSPATLSVTPGDSVSLSCRASQSTRNSL | 614 |
| | MHWVKQRHGQGLEWIGNIFPHSGITNYDERFKN | | HWFQQKSHESPRLLINYVSQSISGIPSRFRGSG | |
| | KVTLTVDTSSSTAYMHLSSLTSEDSAVYYCARE | | SGTDFTLTTNSLETEDFGMYFCQQTNSWPYTFG | |
| | GLYAFDYWGQGTTLTVSS | | GGTKLEIK | |
| SCT-Ga350 | EVMLVESGGGLVKPGGSLKLSCAASGFTFSTYA | 285 | MIMMTQSPSSLAVSAGEKVTMSCKSSQSVLYSS | 615 |
| | MSWVRQTPEKRLEWVATTSSGGTYTYYPDSVKG | | NQMNYLAWYQQKPGQSPKLLIYWASTRESGVPD | |
| | RFTISRDNAKNTLYLQMSSLRSEDTAMYYCARH | | RFTGSGSGTDFTLTISSVQSEDLALYYCHQYLS | |
| | FTSTIITHFDYWGHGTTLTVSS | | SLTFGAGTKLELK | |
| SCT-Ga351 | QAYLQQSGAELVRSGASVKMSCKASGYTFTSYN | 224 | DIVMTQSQKFMSTSIGDRVSVTCKASQNVVTNV | 608 |
| | MHWVKQTPGQGLEWTGKTFPGNGFTDYNQTFRD | | AWYQQKPGQSPKALIYSASYRYSGVPDRFTGSG | |
| | KATLTADTSSSTAYMQISSLTSEDSAVYFCTRE | | SGTDFTLTISNVQSEDLADYFCQQHNSYPYTFG | |
| | GWLSLGYWGQGTTLTVSS | | GGTKLEIK | |
| SCT-Ga352 | EVQLQQSGTVLARPGASVKMSCKASGYSFTSYW | 286 | DIVLTQSPATLSVTPGDSVSLSCRASQSITNNL | 616 |
| | MHWVKQRPGQGLEWIGAIYPGNNATRYNQKFMG | | HWYQQKSHESPRLLIKYASQSISGIPSRFSGSG | |
| | KAKLTAVTSASTAYMEISSLTNEDSSVYYCSRE | | SGTDFTLSINSVETEDFGLYFCQQSNSWPYTFG | |
| | GGFGMDYWGQGTSVTVSS | | GGTKLEIN | |
| SCT-Ga353 | EVQLQQSGPELVKPGASMKTSCKASGYSFTDYT | 180 | DVVVTQTPLSLPVSFGDQVSISCRSSQSLANSY | 617 |
| | MNWVKQSHGKNLEWLGLIFPYNGATSYNQKFKG | | GNTYLSWYLHKPGQSPHLLIYGTSNRFSGVPDR | |
| | KATITVDKSSSTAYMELLSLTSEDSAVYYCARG | | FSGSGSGTDFTLKISTIKPEDLGMYYCLQGTHQ | |
| | LRGFFALDYWGQGTSVTVSS | | PWTFGGGTKLEIK | |
| SCT-Ga354 | EVQLQQSGPELVKPGASMKTSCKASGYSFTDYT | 287 | DVVVTQTPLSLPVSFGDQVSTSCRSSQSLANIY | 618 |
| | MNWVKQSHGKNLEWIGLIIPYNGGTSYNQKFKG | | GNTYLSWYLHKPGQSPQLLIYGISNRFSGVPDR | |
| | KATLTVDKSSSTAYMDLLSLTSEDSAVYYCARG | | FSGSGSGTDFTLKTSTIKPEDLGMYYCLQGTHQ | |
| | LRGYYTMDYWGHGTSVTVSS | | PWTFGGGTKLEIK | |
| SCT-Ga355 | QVQLQQPGAELVKPGASVKMSCKASGYTFTTFW | 288 | DTLLTQSPAILSVSPGERVSFSCRASQSVGTST | 619 |
| | INWVKQRPGQGLEWIGDIFPGRGITNYNGKFNN | | QWYQQRTNGSPRLLIKYGFESISGIPSRFSGSG | |
| | KATLTLDTSSSTAYMQLSSLTSEDSAVYYCSRG | | SGTDFTLSTNSVESEDSADYYCQQSYRWPYTFG | |
| | LGYFDVWGAGTTVTVSS | | GGSKLEIK | |
| SCT-Ga356 | QVQLQQSGGEVMKPGASVKISCKATGYTFSNYW | 289 | DIQMTQTTSSLSASLGDRVTISCSASQGISNYL | 620 |
| | IEWVKQRPGHGLEWIGEILPGSGSAYYNEKFRG | | NWYQQKPDGTVTLLIYYTSSLHSGVPSRFSGSG | |
| | KATFTADKSSNTAYMQLSSLTSDDSAVYYCARQ | | SGTDYSLTISNLEPEDIATYFCQHYSKLPYTFG | |
| | KYGNYYYFDYWGQGTTLTVSS | | GGTKLEIK | |
| SCT-Ga357 | QVQLQQPGSELVRPGASVKLSCKASGYTFTSYW | 238 | DIVLTQSPATLSVTPGDSVSLSCRASQSIRNNL | 621 |
| | MHWVKQRHGQGLEWTGNIYPGSGTTNYDEKFKN | | HWFQQKSHESPRLLIKYVFQSISGIPSRFSGSG | |
| | KGTLTVDTSSSTAYIHLSSLTSEDSAVYYCTRE | | SGTDFTLSINSLETEDFGMYFCQQSNSWPYTFG | |
| | GLYPFDYWGQGTTLTVSS | | GGTKLEIK | |
| SCT-Ga358 | EVQLQQSGPELEKPGSSVKISCKASGYSFTDYN | 177 | EIVLTQSPAIMSASPGEKVTVTCSAGSSVSSSD | 622 |
| | MHWVKQSNGKSLEWIGDIDVYYSGTSYNQKFKG | | LHWYQQKSGSSPRLLIYDTSKLASGVPVRFSGS | |
| | KATLTVDKSSSTTYMELKSLTSEDSAVYFCARS | | GSGTSYALTISRMEAEDAATYYCQQWSSYPLTF | |
| | SLRWYFDLWGAGTTVTVSS | | GAGTKLELK | |
| SCT-Ga359 | QITLKESGPGLVQPSQPFRLTCTFSGFSLSTSG | 290 | DVLLTQTPLSLPVSLGDQASTSCRSSQSIVHSN | 623 |
| | IGVTWIRQPSGKGLEWLATIWWDDDSRYNPSLK | | GNTYLEWYLQKPGQSPKLLIYKVSNRFSGVPDR | |
| | SRLTVSKDTSNNQAFLNIITVETADTAIYYCAQ | | FSGSGSGTDFTLKIRRVEAEDLGVYYCFQGSHV | |
| | SGGITLMDYWGQGTSVTVSS | | PGTFGGGTRLEIK | |
| SCT-Ga360 | EVQLQQSGPELVKPGASIKISCKASGYSFTGYT | 291 | DVVVTQTPLSLPVSFGDQVSISCRSSQSLANSY | 572 |
| | MNWVKQSHGKNLEWIGLIFPYNGATSYNQKFQG | | GNTYLSWYLHKPGQSPQLLIYGISNRFSGVPDR | |
| | KATLTVDKSSNTTYMELLSLTSEDSAVYYCARG | | FSGSGSGTDFTLKISTIKPEDLGMYYCLQGTHQ | |
| | LRGYFAMDYWGQGTSVTVSS | | PWTFGGGTKLEIK | |
| SCT-Ga361 | QVQLQQPGSELVRPGASVKLSCKASGYTFTSYW | 292 | DIVLTQSPATLSVTPGDSVSLSCRASQNIRNNL | 624 |
| | MHWVRQRHGQGLEWIGNIFPGSGTTNYDEKFKN | | HWFQQKSHESPRLLIKYASQSISGIPSRFSGSG | |
| | RGTLTVDTSSSTANMHLSSLTSEDSAVYYCTRE | | SGTDFTLSINSLETEDFGMFFCQQSNSWPYTFG | |
| | GLYPFDYWGQGTTLTVSS | | GGTKLEIK | |
| SCT-Ga362 | QVQLQQPGSELVRPGASVKLSCKASGYTFTSYW | 293 | DIVLTQSPATLSVTPGDSVSLSCRASQNIRNNL | 529 |
| | MHWVKQRHGQGLEWIGNIFPGTGSANYDERFKN | | HWFQQKSHESPRLLIKYASQSISGIPSRFSGSG | |
| | KGTLTVDTSSSTAYMHLSSLTYEDSAVYYCTRE | | SGTDFTLSINSLETEDFGMYFCQQSNSWPYTFG | |
| | GLSPFDYWGQGTTLTVSS | | GGTKLEIK | |
| SCT-Ga363 | EVQLQQSGPELEKPGSSVKISCKASGYSFTDYN | 177 | EIVLTQSPATMSASPGEKVTVTCSAGSSVSSRY | 625 |
| | MHWVKQSNGKSLEWIGDIDVYYSGTSYNQKFKG | | FHWYQQKSGSSPRLLIYDTSKLASGVPVRFSGS | |
| | KATLTVDKSSSTTYMELKSLTSEDSAVYFCARS | | GSGTSYALTISRMEAEDAATYYCQQWSSYPLTF | |
| | SLRWYFDLWGAGTTVTVSS | | GAGTKLELK | |
| SCT-Ga364 | QAYLQQSGAELVRSGASVKMSCKASGYTFTSYS | 294 | DIVMTQSQKFMSTSVGDRVSVTCKASQNVHTNV | 626 |
| | MHWVKQTPGQGLEWIGCIYPGNVITNYNQKFKG | | AWYQQKPGQSPKTLIYSASYRYSGVPDRFTGSG | |
| | KATLTADTSSSTAYMQISSLTSEDSAVYFCARD | | SGTDFTLTISNVQSEDLAEYFCQQYNSYPYTFG | |
| | GGFGTYWGQGTLVTVSA | | GGTKLEIK | |
| SCT-Ga365 | QAYLQQSGAELVRSGASVKMSCKASGYTFTSYN | 295 | QVVLTQSPAIMSASPGEKVTMTCSASSSVSYMH | 512 |
| | LHWVKQTPGQGLEWIGYIYPGNGYTNYNQKIKG | | WYQQKSGTSPKRWIYATSKLASGVPARFSGNGS | |
| | KATLTADTSSSTAYMQISSLTSEDSAVYFCARE | | GTSYSLTISSMEAEDAATYYCQQWNSNPPTFGA | |
| | GGWAMDYWGQGTSVTVSS | | GTKLDLK | |
| SCT-Ga366 | EVQLQQSGPELVKPGASLKISCKASGYSFTGYT | 296 | DVVVTQTPLSLPVSFGDQVSISCRSSQSLANSY | 627 |
| | MNWVKQSHGKNLEWIGLIFPYNGATSYNQKFQG | | GNTYLSWYLHKPGQSPQLLIYGISNRFSGVPDR | |
| | KATLTVDKSSNTTYMELLSLTSEDSAVYYCTRG | | FSGSGSGTDFTLTISTIKPEDLGMYYCLQGTHL | |
| | LRGYFALDYWGQGTSVTVSS | | PWTFGGGTKLEIK | |
| SCT-Ga367 | EVQLQQSGPELVKPGASMKISCKASGYSFTGYT | 173 | DWMTQTPLSLPVSFGDQVSISCRSSQSLANSY | 628 |
| | MNWVKQSHGKNLEWLGLIFPYNSATSYNQKFTG | | GNTYLSWYLYKPGQSPHLLIYGISNRFSGVPDR | |
| | KATITVDKSSNTTYMELLSLTSEDSAVYYCARG | | FSGSGSGTDFTLKISTIKPEDLGMYYCLQGTHQ | |
| | LRGFFALDYWGQGTSVTVSS | | PWTFGGGTKLEIK | |
| SCT-Ga368 | QAYLQQSGAELVRSGASVKMSCKASGYTFTSYN | 297 | DIVMTQSQKFMSTSVGDRVSVTCKASQNVGTNV | 629 |
| | MHWVKQTPGQGLEWIGYIYPGNGGTNYNQKFKG | | AWYQQKPGQSPKVLIYSASYRYSGVPDRFTGSG | |
| | KATLTADTSSNTAYMQISSLTSEDSAVYFCARD | | SGTDFTLTISNVQSEDLAEYFCQQYNSYPLTFG | |
| | GFYPFDYWGQGTTLTVSS | | AGTKLELK | |
| SCT-Ga369 | QAYLQQSGAELVRSGASVKMSCKASGYTFTSYN | 298 | QIVLTQSPVTMSASPGEKVTMTCSATSSVSSMH | 630 |
| | LHWIKQTPGQGLKWIGYIYPGNGYTNYNQKFKG | | WYQQKSGTSPKRWIYDTSKLASGVPIRFSGSGS | |
| | KATLTADTSSSTAYMQINSLTSEDSAVYFCARE | | GTSYSLTISSMEAEDAATYYCQQWSSNPSTFGA | |
| | GGWAMDYWGQGTSVTVSS | | GTKLELK | |
| SCT-Ga370 | QTQLVQSGPELQKPGETVKISCRASGYTFTNYG | 299 | DIVMTQAAFSNPVTLGTSASISCRSSKNLLHSN | 466 |
| | MNWVKKAPGKGLKWMGWINTYTGESAYADDFKG | | GITYLYWYLQRPGQSPQVLIYRMSNLASGVPNR | |
| | RFAFSSETSASTAYLQINNVKNDDTATYFCARD | | FSGSGSGTDFTLRISRVEAEDVGVYYCGQLLEL | |
| | SFAHWGQGTLVTVSA | | PYTFGGGTKLEIK | |
| SCT-Ga371 | EVQLQQSGPELVKPGVSMKISCKASGYSFTGYT | 300 | DVVMTQTPLSLPVSFGDQVSISCRSSQSLANSY | 631 |
| | MNWVKQSHGKNLEWLGLIFPYNSATSYNQKFTG | | GNTYLSWYLHKPGQSPHLLIYGISNRFSGVPDR | |
| | KATITVDKSSNTTYMELFSLTSEDSAVYYCARG | | FSGSGSGTDFTLKISTIKPEDLGMYYCLQGIHQ | |
| | LRGFFALDYWGQGTSVTVSS | | PWTFGGGTKLEIK | |
| SCT-Ga372 | EVQLQQSGTVLARPGASVKMSCKASGYSITSYW | 301 | DVVLTQSPATLSVTPGDSVSLSCRASQTISNNL | 580 |
| | MHWVKQRPGQGLEWIGGIYPGNSNTNYNQKFKG | | HWYQQKSHESPRLLIKYSSQSISGIPSRFSGSG | |
| | KAKLTAVTSASTANMELSSLTNEDSAVYYCTRE | | SGTDFTLSINSVETEDFGMYFCQQSYSWPYTFG | |
| | GGYGMDYWGQGTSVTVSS | | GGTKLEIK | |
| SCT-Ga373 | EVKLVESGGGLVKPGGSLKLSCAASGFAFSTYD | 176 | DIQMNQSPSSLSASLGDTITITCHASQNINVWL | 632 |
| | MSWVRQTPEKRLEWVATISSGGSYTYYPDSVKG | | SWYQQKPGNIPKLLIYKASTLHTGVPSRFSGSG | |
| | RFTISRDNARNTLYLQMSSLRSEDTALYYCARQ | | SGTGFTLNISSLQPEDIATYYCQQGQSYPWTFG | |
| | DYRYPYIMDYWGQGTSVTVSS | | GGTKLEIK | |
| SCT-Ga374 | QVQLQQSGGEVMKPGASVKISCKATGYTFSNYW | 302 | DIQMTQTTSSLSASLGDRVTISCSASQGISNYL | 633 |
| | IEWVKQRPGHGLEWIGEILPVSDSAYYNERCRC | | NWYQQKPDGTVTLLIYYTSTLHSGVPSRFSGSG | |
| | KATFTADESSTTAYMHLSGVASEDSAVYYCARQ | | SGTEYSLTISSLEPEDIATYYCQHYSKLPYTFG | |
| | KYGTYYYFDYWGQGTTLTVSS | | GGTKLEIK | |
| SCT-Ga375 | QITLKESGPGIVQPSQPFRLTCTFSGFSLSTSG | 267 | DVLMTQSPLSLPVSLGDQASISCRSSQSIVHSD | 531 |
| | IGVTWIRQPSGKGLEWLATIWWDDDNRYNPSLK | | GNTYLEWYLQKPGQSPKLLIYKVSRRFSGVPDR | |
| | SRLTVSKDTSNNQVFLNIIAVETADTAMYYCAQ | | FSGSGSGTDFTLKISRVGAEDLGVYYCFQGSHV | |
| | SGGITLMDYWGQGTSVTVSS | | PGTFGGGTKLEIK | |
| SCT-Ga376 | QVQLQQSGVELVRPGTSVKISCKASGYTFTNFW | 303 | DIKMTQSPSSTYASLGERVTITCKASQDIKSYL | 634 |
| | LSWVKQRPGHGLEWIGDIFPGGDYTNYNEKFKG | | SWFQQKPWKSPKTLIYYATRLADGVPSRFSGSG | |
| | KATLTADTSSSTAYIQLSSLTSEDSAVYFCSRS | | SGQDYSLTISSLESDDTATYYCLHHGERPYTFG | |
| | TIISGAYWGQGTLVTVSE | | GGTKLEIK | |
| SCT-Ga377 | QVQLQQPGSELVRPGASVKLSCKASGYTFTSYW | 304 | DIVLTQSPATLSVTPGDSVSLSCRASPNIRNSL | 612 |
| | MHWVKQRHGQGLEWIGNIYPGSGTTNYDEKFKS | | HWFQQKSHESPRLLISYASQSISGIPSRFSGSG | |
| | KVTLTVDTSSSTAYMHLSSLTSEDSAVYFCTRE | | SGTDFTLSINSLETEDFGMYFCQQSNSWPYTFG | |
| | GLYAFDYWGQGTTLTVSS | | GGTKLEIK | |
| SCT-Ga378 | EVQLQQSGPELVKPGASMKISCKASGYSFTGYI | 305 | DVVVTQTPLSLPVSFGDQVSISCRSSQSLANSY | 635 |
| | MNWVRQSHGKSLEWTGLINPYNGGTSYNQKFKG | | GSTYLSWYLHKPGQSPQLLIYGISNRFSGVPDR | |
| | KATLTVDKSSSTAYMELLSLTSEDSAVYYCTRL | | FSGSGSGTDFTLKISTIKPEDLGMYYCLQGTHQ | |
| | LRFAMDYWGQGTSVTVSS | | PPTFGGGTKLEIK | |
| SCT-Ga379 | EVNLVESGGGLVKPGGSLKLSCAASGFVFSSYD | 306 | DIQMNQSPSSLSASLGDTITITCHASQNINVWL | 636 |
| | MSWVRQTPEKRLEWVATISSGGSYTYYPDSVKG | | NWYQQKPGNIPKLLIYKASNLHTGVPLRFSGSG | |
| | RFTTSRDNARNTLYLQMSSLRSEDTALYYCARQ | | SGTGFTLTISSLQPEDIATYYCQQGQSYPWTFG | |
| | DYRYPYTMDYWGQGTSVTVSS | | GGTKLEIK | |
| SCT-Ga380 | EVNLVESGGGLVQPGGSLRLSCSTSGFPFNDYY | 307 | DIQMTQSSSYLSVSLGGRVTITCKASDHINNWL | 596 |
| | MSWVRQPPGKALEWLCLIRNKANGYTTEYSSSV | | AWYQQKPGNSPRLLISGATSLGAGVPSRFSGSG | |
| | KGRFTISRDNSQSILYLQMNTLRAEDSATYYCA | | SGKDYTLSITSLQTEDVATYYCQQYWSIPFTFG | |
| | RDGGYWGQGTTLTVSS | | SGTKLEIK | |
| SCT-Ga381 | EFQLQQSGTVLARPGASVKMFCKASGYSFTRYW | 308 | DIVLTQSPATLSVTPRNSVSLSCRASQSIRNNL | 637 |
| | MHWVKQRPGQGLEWIGAFYPGNSATNYNQKFKG | | HWYQQKSHGSPRLLIKYVSQSISGIPSRFSGSG | |
| | KAKLTAVTSASTAYMELNSLTNEDSAVYYCSRE | | SGTDFTLSINSVETEDFGMYFCQQSNSWPYTFG | |
| | GGYGMDHWGQGASVTVSS | | GGTKLEIN | |
| SCT-Ga382 | QVQLQQSGPEWRPGVSVKISCKGSGYTFTDYA | 309 | ENVLTQSPAIMSASPGEKVTMTCRASSSVSSSY | 638 |
| | MHWVKQSHAKSLEWIGVIGTSNGNTNYNQKFRG | | LHWYQQKSGASPKLWIYSTSNLASGVPARFSGS | |
| | KATMAVDKSSSTAYMELARLTSEDSAIYYCTRD | | GSGTSYSLTISSVEAEDAATYYCQQYSGYPLTF | |
| | YYGRSYLYFDYWGQGTTLTVSS | | GGGTKLEIK | |
| SCT-Ga383 | EVQLQQSGPELVKPGASMKISCKASGYSFTGYT | 310 | DVVVTQTPLSLPVSFGDQVSISCRSSQSLTNSY | 639 |
| | MNWVKQSHGKNLEWIGLIFPYNGGTSYNQRFMG | | GDTYLSWYLHKPGQSPQLLIYGISNRFSGVPDR | |
| | KATLTVDKSSNTAYMELLSLTSEDSAVYYCARS | | FSGSGSGTDFTLKISTIKPEDLGMYYCLQGTHQ | |
| | RSFAMDYWGQGTSVTVSS | | PWTFGGGTKLEIK | |
| SCT-Ga384 | EVKLVESGGGLVQPGGSLRLSCATSGFTFSDYY | 311 | DIQMTQSSSYLSVSLGGRVTITCKASDHINNWL | 552 |
| | MSWVRQPPGKALEWLALIRNKANGYTTEYSVSV | | AWYQQKPGNAPRLLISGATSLETGVPSRFSGSG | |
| | KGRFTISRDNSQSILYLQMNTLRAEDSATYYCA | | SGKDYTLSITSLQTEDVATYYCQQYWSIPFTFG | |
| | RDGGYWGQGILVTVSS | | SGTKLEIK | |
| SCT-Ga385 | QIQLVQSGPELKKPGETVKISCKASGYTFTDHS | 312 | DIQMTQSSSYLSVSLGGRVTITCKASDHINNWL | 640 |
| | MHWVRQAPGQVLKWMGWINTETGEPTYVDDFKG | | AWYQQKPGNAPRLLISGATSLETGVPSRFSGSG | |
| | RFAFSLEASASTAYLQINNLKNEDTATYFCASP | | SGKDYTLIITSLQTEDVATYYCQQYWSTPLTFG | |
| | RNYDGAMDYWGQGISVTVSS | | AGTKLELK | |
| SCT-Ga386 | EVKLVESGGGLVQPGGSLRLSCATSGFTFTSYY | 313 | DIQMTQSPASLSASVGETVTITCGASEHIYGAL | 641 |
| | MSWVRQPPGKALEWLALIRDKANGYTTEYSVSV | | NWYQRKQGKSPQLLIYGATNLADGMSSRFSGSG | |
| | KGRFTISRDNSQSILYLQMNTLRAEDSATYYCA | | SGRQYSLKISSLHPDDVATYYCQNVLSTPLTFG | |
| | RDGGYWGQGTLVTVSA | | AGTKLELK | |
| SCT-Ga387 | QVQLQQSGPELVKPGASVKISCKASGYAFSSSW | 314 | DIVLTQSPASLAVSLGQRATISCRASKSVSTSG | 642 |
| | MNWVKQRPGQGLEWIGRIYPGDGDTYYSGKFKD | | YSYMHWYQQKPGQPPKLLIYLASNLESGVPARF | |
| | KATLTADKSSSTAYMQLSSLTSVDSAVYFCASN | | SGSGSGTDFTLNIHPVEEEDAATYYCQHSRELP | |
| | YYYFDYWGQGTTLTVSS | | WTFGGGTKLEIK | |
| SCT-Ga388 | QVQLQQSGAELAKPGASVKMSCKASGYTFTNYW | 315 | DIQMTQSSSYLSVSLGGRVTITCKASDHINNWL | 643 |
| | MHWVKQRPGQGLEWIGYTNPSTGSSDYNQKFKD | | AWYQQKPGNAPRLLISGASRLETGVPSRFSGSG | |
| | KATLTADKSSSTAYMQLSSLTSEDSAVYYCAAY | | SGKDYTLTITSLQTEDVATYYCQQYWSTPWTFG | |
| | YRYGDGAYWGQGTQVTVSA | | GGTKLEIK | |
| SCT-Ga389 | EVMLVESGGGLVKPGGSLRLSCAASGFTFSTYV | 316 | DIQMNQSPSSLSASLGDTITITCHASQNINVWL | 644 |
| | MSWVRQTPEKRLEWVATISSGGSYIHYPDSVQG | | SWYQQKPGNITKLLIYKASNLHTGVPSRFSGSG | |
| | RFTISRDNAKNTLYLQMSSLRSEDTAMYFCARW | | SGTGFTLTISSLQPEDIATYYCQQGQSYPRTFG | |
| | LLGLYAMDYWGQGTSVTVSS | | GGTKLEIK | |
| SCT-Ga390 | EVKLVESGGGLVQPGGSLRLSCATSGFTFSDYY | 311 | DIQMTQSSSYLSVSLGGRVTITCKASDHINNWL | 645 |
| | MSWVRQPPGKALEWLALIRNKANGYTTEYSVSV | | AWYQQKPGNAPRLLISGATSLETGVPSRFSGSG | |
| | KGRFTISRDNSQSILYLQMNTLRAEDSATYYCA | | SGKDYTLSITSLQTEDVATYYCQQYWSTPFTFG | |
| | RDGGYWGQGILVTVSS | | SGTKLEIK | |
| SCT-Ga391 | QVQLQQSGAELVRPGSSLKISCKASGYAFSSYW | 317 | DIQMTQSSSYLSVSLGGRVTITCKASDHINNWL | 645 |
| | MNWVKQRPGQGLEWIGQIYPGDGDSDYNGKFKV | | AWYQQKPGNAPRLLISGATSLETGVPSRFSGSG | |
| | KATLTADKSSSTAYMQLSSLTSEDSAVYFCARR | | SGKDYTLSITSLQTEDVATYYCQQYWSTPFTFG | |
| | KDYGYDYWGQGTTLTVSS | | SGTKLEIK | |
| SCT-Ga392 | EVKLVESGGGLVQPGGSLRLSCATSGFTFSEFY | 318 | DIVMSQSPSSLTVSVGEKVTMSCKSSQSLLYSG | 646 |
| | MEWVRQPPGKRLEWIAASRNKANDYSTDYSASV | | NQKNYLAWYQQKPGQSPKLLIYWASTRESGVPD | |
| | KGRFIVSRDTSQNILYLQMTALRADDTAIYYCA | | RFTGSGSGADFTLTINNMKAEDLAIYYCQQYYS | |
| | RDAYGYPWFVYWGQGTLVTVSA | | YPWTFGGGTKLEIK | |
| SCT-Ga393 | DVQLVESGGGLVQPGGSRKLSCAASGFTFSNFG | 319 | DIQMTQTTSSLSASLGDRVTISCRSSQDISNYL | 647 |
| | MDWVRQAPEKGLEWIAYISSGSSTIYYADTVKG | | NWYQQKPDGTVKLLIYYTSRLHSGVPSRFSGSG | |
| | RFTISRDNPKNTLFLQMTSLRSEDTAMYFCARG | | SGTDYSLTISNLEQEDIATYFCQQGNTLPFTFG | |
| | RYDYLYAMDYWGQGTSVTVSS | | TGTKLELK | |
| SCT-Ga394 | EVKLVESGGGLVQPGGSLRLSCATSGFTFTDYY | 320 | DIQMTQSSSYLSVSLGGRVTITCKASDHINNWL | 552 |
| | MSWVRQPPGKALEWLALITNKANGYTTDYSVSV | | AWYQQKPGNAPRLLISGATSLETGVPSRFSGSG | |
| | KGRFTISRDNSQSILYLQMNTLRAEDSATYYCA | | SGKDYTLSITSLQTEDVATYYCQQYWSIPFTFG | |
| | RDGGYWGQGTLVTVSA | | SGTKLEIK | |
| SCT-Ga395 | EVKLEKSRGGLVKPGGSMKLSCVASGFTFSNFW | 321 | DIQMTQSPSSLSASLGERVTLTCRAGQEISGFL | 648 |
| | MNWVRQSPEKGLEWVAQIRLNSDNYATHYAESV | | SWLQQKPDGTIKRLIYAASTLDSGVPKRFSGRR | |
| | KGRFTISRDDSKSSVYLQMNSLGAEDTGIYYCH | | SGSDYSLTISSLESEDFADYYCLQYASYPPTFG | |
| | GNFYDLDYWGQGTSVTVSS | | GGTKLEIK | |
| SCT-Ga396 | EVQLQQSGPELVKPGASMKISCKASGFSFTAYT | 322 | DVVVTQTPLSLPVSFGDQVSISCRSSQSLANSY | 649 |
| | MNWVKQSQGDNLEWIGLIVPYNGGTSYNLKFKG | | GSTYLSWYLHKPGQSPQLLIYGISNRFSGVPDR | |
| | KATLTVDKSSSTAYMELLSLTSEDSAVYYCARG | | FSGSGSGTDFTLKISTIEPEDLGMYYCLQYTHQ | |
| | LQRFFAMDFWGQGTSVTVSS | | PPTFGGGTKLEIK | |
| SCT-Ga397 | EVQLQQSGPELVKPGASMKMSCKASGYSFTTYT | 323 | DVVVTQTPLSLPVSFGDQVSISCRSSQSLANSY | 650 |
| | MSWVKQSHGKNLEWIGLINPYNGGTSYNQKFKG | | GDTYLSWYLHKPGQSPQLLIYGISNRFSGVPDR | |
| | KATLTVDKSSSTAYMELLSLTSEDSAVYYCARS | | FSGSGSGTDFTLKISTIKPEDLGMYYCLQGTHQ | |
| | RSFAMDYWGQGTSVTVSS | | PWTFGGGTKLEIK | |
| SCT-Ga398 | QVQLQQSGAELAKPGASVKMSCKASGYTFTNYW | 315 | DIQMTQSSSYLSVSLGGRVTITCKASDHINNWL | 651 |
| | MHWVKQRPGQGLEWIGYTNPSTGSSDYNQKFKD | | AWYQQKPGNAPRLLISGASRLETGVPSRFSGSG | |
| | KATLTADKSSSTAYMQLSSLTSEDSAVYYCAAY | | SGRDYTLTITSLQTEDVATYYCQQYWSTPWTFG | |
| | YRYGDGAYWGQGTQVTVSA | | GGTKLEIK | |
| SCT-Ga399 | EVQLQQSGPELVKPGASMKISCKASGYSFTGYT | 324 | DVVVTQTPLSLPVSFGDQVSISCRSSQSLTNSY | 652 |
| | MNWVRQSHGKDLEWIGLIIPYNGGTSYNQKFKG | | GNTYLSWYLHKPGQSPQLLIYGISNRFSGVPDR | |
| | KATITVDKASSTAYMDLLSLTSEDSAVYYCARG | | FSGSGSGTDFTLKISTIKPEDLGMYYCLQGTHQ | |
| | LRGYFAMDYWGQGTSVTVSS | | PWTFGGGTKLEIK | |
| SCT-Ga400 | EVQLQQSGPELVKPGASVKISCKASGYTFTDYN | 325 | DIQMTQSSSYLSVSLGGRVTITCKASDHINNWL | 653 |
| | MHWVKQSHGKSLEWIGYIYPYNGGTGYNQKFKS | | AWYQQKPGNAPRLLISGATSLETGVPSRFSGSG | |
| | KAPLTVDTSSSTAYMELRSLTSEDSAVYYCARY | | SGKDYTLSITSLQTEDVATYYCQQYWSTPLTFG | |
| | YGYFDYWGQGTTLTVSS | | AGTKLELK | |
| SCT-Ga401 | EVQLQQSGPELVKPGASMKISCKASGYSFTGYI | 326 | DVVVTQTPLSLPVSFGDQVSISCRSSQSLANSY | 482 |
| | MNWVKQSHGDNLEWIGLIVPYNGGTSYNLKFKG | | GNTYLSWYLHKPGQSPQLLIYGISNRFSGVPDR | |
| | KATLTVDKSSSTAYMELLSLTSEDSAVYYCARG | | FSGSGSGTDFTLKISTIKPEDLGMYYCLQGTHQ | |
| | LQRFYAMDYWGQGTSVTVSS | | PPTFGGGTKLEIK | |
| SCT-Ga402 | EVKLVESGGGLVQPGGSLRLSCATSGFTFTSYY | 313 | DIQMTQSSSYLSVSLGGRVTITCKASDHINNWL | 645 |
| | MSWVRQPPGKALEWLALIRDKANGYTTEYSVSV | | AWYQQKPGNAPRLLISGATSLETGVPSRFSGSG | |
| | KGRFTISRDNSQSILYLQMNTLRAEDSATYYCA | | SGKDYTLSITSLQTEDVATYYCQQYWSTPFTFG | |
| | RDGGYWGQGTLVTVSA | | SGTKLEIK | |
| SCT-Ga403 | EVKLEKSRGGLVQPGGSMKISCVASGFTFSNFW | 327 | DIQMTQSPSSLSASLGEGVTLTCRAGQEITGFL | 654 |
| | MNWVRHSPEKGLEWVAQIRLNSDNYATHYAESV | | SWLQQKPDGTIKRLIYAASTLDSGVPKRFSGRR | |
| | KGRFTISRDDSKRSVYLQMNSLGAEDTGIYYCH | | SGSDYSLTISSLESEDFADYYCLQYASYPPTFG | |
| | GNFYTLDYWGQGISVTVSS | | GGTKLEIK | |
| SCT-Ga404 | QVQLQQSGAELAKPGASVKMSCKASGYTFTNYW | 328 | DIQMTQSSSYLSVSLGGRVTITCKASDHINNWL | 655 |
| | MHWVKQRPGQGLEWIGYTNPSTGYSDYNQKFKD | | AWYQQKPGNAPRLLISGATSLETGVPSRFSGSG | |
| | KATLTADKSSSTAYMQLSSLTSEDSAVYYCAAY | | SGKDYTLTITSLQTEDVATYYCQQYWSTPWTFG | |
| | YRYGDGAYWGQGTQVTVSA | | GGTKLEIK | |
| SCT-Ga405 | DVQLVESGGGLVQPGGSRKLSCAASGFTFSSFG | 329 | DIQMTQTTSSLSASLGDRVTISCRASQDISNYL | 656 |
| | MDWVRQAPEKGLEWIAYISSGSSTIYYADTVKG | | NWYQQKPDGTVKLLIYYTSRLHSGVPSRFSGSG | |
| | RFTISRDNPKNTLFLQMTSLRSEDTAMYYCARG | | SGTDFSLTISNLDQEDIATYFCQQGNTLPFTFG | |
| | RFDYLYAMDYWGQGTSVTVSS | | VGTKLELK | |
| SCT-Ga406 | EVQLQQSGPELVKPGASMKISCKASGYSFTGYT | 330 | DVVVTQTPLSLPVSFGDQVSISCRSSQSLANSY | 572 |
| | MNWVKQSHGKNLEWIGLINPYNGGTSYNQKFKG | | GNTYLSWYLHKPGQSPQLLIYGISNRFSGVPDR | |
| | KATFTVDKSSSTAYMELLSLTSEDSAVYYCARG | | FSGSGSGTDFTLKISTIKPEDLGMYYCLQGTHQ | |
| | LRFSLEYWGQGTTLTVSS | | PWTFGGGTKLEIK | |
| SCT-Ga407 | EVQLQQSGPELVKPGASVKISCKASGYSFTGYI | 331 | DVVLTQTPLSLPVSFGDQVSISCRSSQSLANSY | 657 |
| | MNWVKQSHGKNLEWIGLIIPYNGGTSYNQKFRG | | GNTYLSWYLHKPGQSPQLLIYEISNRFSGVPDR | |
| | KATLTVDKSSSTAYMDLLSLTSDDSAVYYCARG | | FSGSGSGTDFTLKISTIKPEDLGMYYCLQGTHQ | |
| | LSYRYDYWGQGTTLTVSS | | PPTFGGGTKLEIK | |
| SCT-Ga408 | EVQLQQSGPELVKPGVSMKISCKASGYSFTGYT | 332 | DVVVTQTPLSLPVSFGDQVSISCRSSQSLTNSY | 652 |
| | MNWVRQSHGKDLEWIGLIIPYNGGTSYNQKFKG | | GNTYLSWYLHKPGQSPQLLIYGISNRFSGVPDR | |
| | KATITVDKASSTAYMDLLSLTSEDSAVYYCARG | | FSGSGSGTDFTLKISTIKPEDLGMYYCLQGTHQ | |
| | LRGYFAMDYWGQGTSVTVSS | | PWTFGGGTKLEIK | |
| SCT-Ga409 | EVQLQQSGPELVKPGASMKISCKASGYSFTGYI | 333 | DVVVTQTPLSLPVSFGDQVSISCRSSQSLANSY | 658 |
| | MNWVKQSHGKNLDWTGLTYPYNGGTSYNQKFKG | | GKTYLSWYLHKPGQSPQLLIYGISHRFSGVPDR | |
| | RATLTVDKSSSTAYMELLSLTSEDSAVYYCARL | | FSGSGSGTDFTLRISTIKPEDLGMYYCLQGTHQ | |
| | ISYAMDYWGQGTSVTVSS | | PPTFGGGTKLEIK | |
| SCT-Ga410 | QIQLVQSGPELKKPGETVKISCKASGYTFTDHS | 334 | DIQMTQSSSYLSVSLGGRVTITCKASDHINNWL | 659 |
| | MHWVKQAPGKGLKWMGWINTETGEPTYVDDFKG | | AWYQQKPGNAPRLLISGATSLETGVPSRFSGSG | |
| | RFAFSLETSASTAYLQINNLKNEDTAAYFCASP | | SGKDYTLSIISLQTEDVATYYCQQYWSTPLTFG | |
| | RNYDGAMDYWGQGTSVTVSS | | AGTKLELK | |
| SCT-Ga411 | QVQLQQSGAELAKPGASVKMSCKASGYTFTNYW | 335 | DIQMTQSSSYLPVSLGGRVTITCKASDHINSWL | 660 |
| | MHWVKQRPGQGLEWIGYTNPSTGYSEYNQKFKD | | AWYQQKPGNAPRLLISGTTSLETGIPSRFSGSG | |
| | KATLTADKSSSTAYMQLSSLTSEDSAVYYCAAY | | SGKDYTLTITSLQTEDVATYYCQQYWSTPWTFG | |
| | YRYGDGAYWGQGTQVTVSA | | GGTKLEIK | |
| SCT-Ga412 | QVQLQQSGTELVRPGTSVKVSCKASGYAFTDYL | 336 | DIVMTQSPSSLSVSAGEKVTMSCKSSQSLLNSG | 661 |
| | IEWVKQRPGQGLEWTGVINPGSGGAIYNEKFKG | | NQKNYLAWYQQKPGQPPKLLIYGASTRESGVPD | |
| | KVTLTADKSSSTAYMQLSSLTSDDSAVYFCARY | | RFTGSGSGTDFTLTIGSVQAEDLAVYYCQNYHS | |
| | HYYGSGLFPYWGQGTLVTVSA | | YPFTFGSGTKLEIK | |
| SCT-Ga413 | EVQLQQSGPELVKPGASVKMSCKASGYTFTSYV | 337 | DIQMTQSSSYLSVSLGGRVTITCKASDHINNWL | 643 |
| | MHWVKQKPGQGLEWIGYINPYNDGTQYNEKFRG | | AWYQQKPGNAPRLLISGASRLETGVPSRFSGSG | |
| | KATLTSDKSSSTAYMELSSLTSEDSAVYYCARE | | SGKDYTLTITSLQTEDVATYYCQQYWSTPWTFG | |
| | IDYWGQGTTVTVSS | | GGTKLEIK | |
| SCT-Ga414 | EVKLVESGGGLVQPGGSLRLSCATSGFTFSDYY | 338 | DIQMTQSSSYLSVSLGGRVTITCKASDHINNWL | 552 |
| | MSWVRQPPGKALEWLALIRNKANCYTTDYSVSV | | AWYQQKPGNAPRLLISGATSLETGVPSRFSGSG | |
| | KGRFTISRDNSQSILYLQMNTLRAEDSATYYCA | | SGKDYTLSITSLQTEDVATYYCQQYWSIPFTFG | |
| | RDGGYWGQGILVTVSS | | SGTKLEIK | |
| SCT-Ga415 | QIQLVQSGPELKKPGETVKISCKASGYTFTNYG | 339 | ETTVTQSPASLSVATGEKVTIRCITSTDIDDDM | 662 |
| | MNWVKQAPGKGLKWMGWINTYTGEPTYADDFKG | | NWYQQKPGEPPKLLISEGNTLRPGVPSRFSSSG | |
| | RFAFSLETSASTAYLQINNLKNEDTATYFCARY | | YGTDFVFTIENTLSEDVADYYCLQSDNMPYTFG | |
| | EYFDYWGQGTTLTVSS | | GGTKLEIK | |
| SCT-Ga4i6 | DVQLQESGPGLVKPSQSLSLTCTVTGYSITSDY | 340 | DIVMTQSHKFMSTSVGDRVSITCKASQDVSTTV | 663 |
| | AWNWIRQFPGNKLDWMGYITYSGDTRYNPSLKS | | AWYQQKPGQSPKPLIYSASYRYTGVPDRFTGSG | |
| | RISITRDTSKNQFFLRLNSVTTEDTATYYCARR | | SGTDFTFTISSVQAEDLAVYYCQQHYSVPWTFG | |
| | ELGQGFTYWGQGTLVTVSA | | GGTKLEIK | |
| SCT-Ga417 | QVQLQQSGAELARPGASVTLSCKASGYTFTYYE | 341 | DIQMTQSSSYLSVSLGGRVTITCKASDHINNWL | 645 |
| | IHWVKQTPVHGLEWIGPIDPETGGTAYNQKFKG | | AWYQQKPGNAPRLLISGATSLETGVPSRFSGSG | |
| | KATLTADKSSSTAYMELRSLTSEDSAVYFCTRW | | SGKDYTLSITSLQTEDVATYYCQQYWSTPFTFG | |
| | GYKFAYWGQGTLVTVSA | | SGTKLEIK | |
| SCT-Ga418 | qvqlqqsgaelvrpgtsvkvsckasgydftdyl | 342 | DIVMTQSPSSLSVSAGEKVTMSCKSSQSLLNSG | 664 |
| | IEWVKQRPGQGLEWIGVINPGSGGTKYNEKFKG | | NQKNYLAWYQQKPGQPPKLLIYGASTRESGVPD | |
| | KATLTADKSSSTAYMQLSSLTSDDSAVYFCARY | | RFTGSGSGTDFTLTISSVQAEDLAVYYCQNYHS | |
| | HYYGSNLFPYWGQGTLVTVSA | | YPFTFGSGTKLEVK | |
| SCT-Ga419 | EVQLQQSGPELVKPGASMKMSCKASGYSFTTYT | 343 | DVVVTQTPLSLPVSFGDQVSISCRSSQSLANSY | 572 |
| | MSWVKQSHGKNLEWIGLINPYNGGTSYNQKFKG | | GNTYLSWYLHKPGQSPQLLIYGISNRFSGVPDR | |
| | KATLTFDKSSSTAYMELLSLTSEDSAVYYCARS | | FSGSGSGTDFTLKISTIKPEDLGMYYCLQGTHQ | |
| | RTFAMDYWGQGTSVTVSS | | PWTFGGGTKLEIK | |
| SCT-Ga420 | DVQLVESGGGLVKPGGSLKLSCAASGFTFSSYT | 344 | DIQMNQSPSSLSASLGDTITITCHASQNINVWL | 665 |
| | MSWVRQTPEKRLEWVATISGGGSYTYYPDSVKG | | SWYQQKPGNIPKLLIYKASNLHTGVPSRFSGSG | |
| | RFTISRDNAKNTLNLQKSSLKSEDTAMYYCTRW | | SGTGFTLTISSLQPEDIATYYCQQGQSYPYTFG | |
| | LQSLYAMDYWGQGTSVTVSS | | GGTKLEIK | |
| SCT-Ga421 | EVQLQQSGPELVKPGASMKISCKASGYSFTGYT | 345 | DVVVTQTPLSLPVSFGDQVSISCRSSQSLANSY | 483 |
| | MNWVKQSHGKNLEWIGLINPYNGGTSYNQKFKG | | GNTYLSWYLHKPGQSPQLLIYGISNRFSGVPDR | |
| | KATLTVDKSSSTAYMELLSLTSEDSAVYYCASG | | FSGSGSGTDFTLKISTIKPEDLGMYYCLQGTHQ | |
| | GLRYGFAYWGQGTTLTVSS | | PLTFGAGTKLELK | |
| SCT-Ga422 | EVQLVETGGGLVQPKGSLNLSCAASGFTFNTNA | 346 | ENVLTQSPAIMSASPGEKVTMTCRASSSVSSSY | 666 |
| | MNWVRQAPGKGLEWVARIRSKSNNYATYYADSV | | LHWYQQKSGASPKLWIYTTSKLASGVPARFSGS | |
| | KDRFTISRDDSQSMLYLQMNNLKTEDTAMYYCV | | GSGTSYSLTISSVEAEDAATYYCQQYSGYPLTF | |
| | GSTMTIFSYWGQGTLVTVSA | | GGGTKLEIK | |
| SCT-Ga423 | QVQLKESGPGLVAPSQSLSITCTVSGFSLTSYG | 347 | EILLTQSPAIIAASPGEKVTITCSASSSVSYMN | 667 |
| | VHWVRQPPGKGLEWLGVIWADGSTNYNSALMSR | | WYQQKPGSSPKIWIYGISNLASGVPARFSGSGS | |
| | LSINKDNSKSQVFLKMNSLQTDDTAMYYCARDL | | GTSFSFTINSMEAEDVATYYCQQISSYPLTFGA | |
| | GYLTTAWFAYWGQGTLVTVSA | | GTKLELK | |
| SCT-Ga424 | EVQLQQSGPELVKPGVSMKMSCKASGYSFTAYT | 348 | DVVVTQTPLSLPVSFGDQVSISCRSSQSLANSY | 572 |
| | MSWVKQSHGKSLEWIGLINPYNGGISYNQKFKD | | GNTYLSWYLHKPGQSPQLLIYGISNRFSGVPDR | |
| | KATLTVDKSSTTAYMELLSLTSEDSAVYYCARS | | FSGSGSGTDFTLKISTIKPEDLGMYYCLQGTHQ | |
| | RTFAMDYWGQGTSVTVSS | | PWTFGGGTKLEIK | |
| SCT-Ga425 | EVQLQQSGPELVKPGASMKISCKASGYSFTDYI | 349 | DVVVTQTPLSLPVSFGDQVSISCRSSQSLENSY | 668 |
| | MNWVKQSHGDNLEWIGLIVPYNGGTSYNLNFKG | | GNTYLSWYLHKPGQSPQLLIYGISNRFSGVPDR | |
| | KASLTVDKSSSTAYMELLSLTSEDSAVYYCARG | | FSGSGSGTDFTLKISTIKPEDLGMYYCLQGTHQ | |
| | LQRFYAMDYWGQGTSVTVSS | | PPTFGGGTKLEIK | |
| SCT-Ga426 | QVHLQQSGAELAKPGASVKMSCKASGYTFTNYW | 350 | DIQMTQSSSYLSVSLGGRVTITCKASDHINNWL | 643 |
| | MHWVKQRPGQGLEWIGYTNPSTGSSDYNQKFKD | | AWYQQKPGNAPRLLISGASRLETGVPSRFSGSG | |
| | KATLTADKSSSTAYMQLSSLTSEDSAVYYCAAY | | SGKDYTLTITSLQTEDVATYYCQQYWSTPWTFG | |
| | YRYGDGAYWGQGTQVTVSA | | GGTKLEIK | |
| SCT-Ga427 | EVQLQQSGPELVKPGASMKTSCKASGFSFPGYT | 351 | DVVVTQTPLSLPVSFGDQVSISCRSSQSLANSY | 669 |
| | MNWVKQSHGKNLEWIGLINPYNGATSYNQKFKG | | GNTYLSWYLHKPGQSPQLLIYGISNRFSGVPDR | |
| | KATLTVDKSSNTAYMDLLSLTSEDSAVYYCTRG | | FSGSGSGTDFTLKISTIKPEDLGLYYCLQGTHL | |
| | TLITGFAYWGQGTLVTVSA | | PLTFGAGTKLELK | |
| SCT-Ga428 | EVQLQQSGPELVKPGASMKTSCKASGFSFTGYT | 352 | DVVVTQTPLSLPVSFGDQVSISCRSSQSLANSY | 669 |
| | MNWVKQSHGKNLEWIGLINPYNGATSYNQKFKG | | GNTYLSWYLHKPGQSPQLLIYGISNRFSGVPDR | |
| | KATLTVDKSSSTAYMELLSLTSEDSAVYYCARG | | FSGSGSGTDFTLKISTIKPEDLGLYYCLQGTHL | |
| | TLITGFAYWGQGTLVTVSA | | PLTFGAGTKLELK | |
| SCT-Ga429 | EVQLQQSGPELVKPGASMKTSCKASGYSFTGYI | 353 | DVVVTQTPLSLPVSFGDQVSISCRSSQSLANSY | 670 |
| | MSWVKQSHGKNLEWIGLINPYNGGTSYNQKFKG | | GNTFLSWYLHKPGQSPQLLIYGISNRFSGVPDR | |
| | KATLTIDKSSSTAYMELLSLTSEDSAVYYCARS | | FSGSGSGTDFTLKISSIKPEDLGMYFCLQGTHQ | |
| | RSFAMDYWGQGTSVTVSS | | PWTFGGGTMLEIK | |
| SCT-Ga430 | EVQLQQSGPELVKPGTSMKISCKASGYSFTGYT | 354 | DWMTQSPLSLPVSFGDQVSISCRSSQSLANSY | 671 |
| | MNWVKQSHGKNLEWIGLIVPYNGGTSYNQKFKG | | GDTFLSWYLHKPGQSPQLLIYGISNRFSGVPDR | |
| | KATLTVDKSSSTAYMELLSLTSEDSAVYYCARG | | FSGSGSGTDFTLKISTIKPEDLGMYYCLQGTHQ | |
| | LSFRYDYWGQGTTLTVSS | | PPTFGGGTKLEIK | |
| SCT-Ga431 | EVQLQQSGPELVKPGASMKISCKASGYSFTGYI | 355 | DVVVTQTPLSLPVSFGDQVSISCRSSQSLANSY | 482 |
| | MNWVKQSHGKNLEWIGLIFPYNGGTSYNQKFKG | | GNTYLSWYLHKPGQSPQLLIYGISNRFSGVPDR | |
| | KATLTVDKSSSTAYMELLSLTSEDSAVYYCARG | | FSGSGSGTDFTLKISTIKPEDLGMYYCLQGTHQ | |
| | LPRFYAMDYWGQGTSVTVSS | | PPTFGGGTKLEIK | |
| SCT-Ga432 | QVQLKESGPGLVAPSQSLSITCTVSGFSLTSYG | 356 | DIQMTQSPASLSVSVGETVTITCRASENIYSNL | 672 |
| | VHWVRQPPGKGLEWLGVIWAGGTTNYNSALMSR | | AWYQQKQGKSPQLLVYAATNLVDGVPSRFSGSG | |
| | LSISKDNSKSQVFLKMNSLQTDDTALYYCARFP | | SGTQYSLKINSLQSEDFGSYYCQHFWGTPYTFG | |
| | SYRESMDYWGQGTSVTVSS | | GGTKLEIK | |
| SCT-Ga433 | DVKLVESGGGLVKPGGSLKLSCSASGFTFSSYT | 357 | DIQMNQSPSSLSASLGDTITITCHASQNINVWL | 673 |
| | MSWVRQTPEKRLEWVATISSGGSYTYYPDSVKG | | SWYQQKPGNISKLLIYKASNFHTGVPSRFSGSG | |
| | RFTISRDNAKNTLYLQMSSLKSEDTAMFYCTRW | | SGTNFTLTISSLQPEDIATYYCQQGQTYPFTFG | |
| | LLSLYAMDYWGQGTSVTVSS | | GGTKLEIK | |
| SCT-Ga434 | EVQLQQSGPELVKPGASMKISCKASGYSFTGYI | 358 | DVVVTQTPLSLPVSFGDQVSISCRSSQSLANSY | 658 |
| | MNWVKQSHGKNLEWIGLIYPYNGGTSYNQKFKG | | GKTYLSWYLHKPGQSPQLLIYGISHRFSGVPDR | |
| | RATLTVDKSSSTAYMELLSLTSEDSAVYYCARL | | FSGSGSGTDFTLRISTIKPEDLGMYYCLQGTHQ | |
| | ISYAMDYWGQGTSVTVSS | | PPTFGGGTKLEIK | |
| SCT-Ga435 | EVQLQQSGPELVKPGASMKISCKASGYSFTGYT | 359 | DVVVTQTPLSLPVSFGDQVSISCRSSQSLANSY | 572 |
| | MNWVKQSHGKNLEWIGLINPYNGATSYNQKFKG | | GNTYLSWYLHKPGQSPQLLIYGISNRFSGVPDR | |
| | KATFTVDKSSSTAYMELLSLTSEDSAVYYCARG | | FSGSGSGTDFTLKISTIKPEDLGMYYCLQGTHQ | |
| | LRFSLEYWGQGTTLTVSS | | PWTFGGGTKLEIK | |
| SCT-Ga436 | EVQLQQSGAELVKPGASVKLSCTASGFNIKDTY | 360 | EILLTQSPAIIAASPGEKVTITCSASSSVSYMN | 674 |
| | MHWVKQRPEQGLEWIGRIDPANGNIKFDPKFQG | | WYQQKPGSSPKIWIYGISNLASGVPARFSGSGS | |
| | KATITADTSSNTAYLQLRSLTSADTAVYFCARS | | GTSFSFTINSMEAEDVATYYCQQRSSFPPTFGG | |
| | LPGAYWGQGTLVTVSA | | GTKLEIK | |
| SCT-Ga437 | EVKLVESGGGLVQPGGSLILSCATSGFTFTNYY | 361 | DWMTQTPLTLSVTIGQPASISCKSSQSLLDSD | 381 |
| | MSWVRQPPGKALEWLGFIRNRPYGYTTEYNASV | | GKTYLNWLLQRPGQSPKRLIYLVSKLDSGVPDR | |
| | KGRFTISRDNSQSILYLQMNTLAPEDSATYYCA | | FTGSGSGTDFTLKISRVEAEDLGVYYCWQGTHF | |
| | AGLDYWGQGTTLTVSS | | PYTFGGGTKLEIK | |
| SCT-Ga438 | DVQLVESGGGLVQPGGSRKLSCAASGFTFSNFG | 319 | DIQMTQTTSSLSASLGDRVTISCRASQDISNYL | 675 |
| | MDWVRQAPEKGLEWIAYISSGSSTIYYADTVKG | | NWYQQKPDGTVKLLIYYTSRLHSGVPSRFSGSG | |
| | RFTISRDNPKNTLFLQMTSLRSEDTAMYFCARG | | SGTDYSLTISNLEQEDIATYFCQQGNTLPFTFG | |
| | RYDYLYAMDYWGQGTSVTVSS | | AGTKLELK | |
| SCT-Ga439 | QVQLQQSGAELVRPGTSVKVSCKASGYAFSDYL | 362 | DIVMTQSPSSLSVSAGEKVTMSCKSSQSLLNSG | 676 |
| | IEWVKQRPGQGLEWIGVINPGSGGTNYNEKFKD | | NQKKYLAWYQQKPGQPPKLLIYGASTRESGVPD | |
| | KATLTADKSSSIAYMQLSSLTSDDSAVYFCARF | | RFTGSGSGTDFTLTISSVQAEDLAVYYCQNYHR | |
| | HYYGSSLFPYWGPGTLVTVSA | | FPFTFGSGTKLEIK | |
| SCT-Ga440 | EVQLQQSGPELVKPGASMKISCKASGYSFTGYT | 363 | DVWTQTPLSLPVSFGDQVSISCRSSQSLANSY | 482 |
| | MNWVKQSHGDNLEWIGLIVPYNGGTSYNLKFKG | | GNTYLSWYLHKPGQSPQLLIYGISNRFSGVPDR | |
| | KATLTVDKSSSTAYMELLSLTSEDSAVYYCARG | | FSGSGSGTDFTLKISTIKPEDLGMYYCLQGTHQ | |
| | LQRFYAMDYWGQGTSVTVSS | | PPTFGGGTKLEIK | |
| SCT-Ga441 | EVKLVESGGGLVQPGGSLRLSCATSGFTFTDYY | 364 | DIQMTQSSSYLSVSLGGRVTITCKASDHINNWL | 645 |
| | MSWVRQPPGKALEWLALIRNKANGYTTEYSVSV | | AWYQQKPGNAPRLLISGATSLETGVPSRFSGSG | |
| | KGRFTISRDNSQSILYLQMNTLRAEDSATYYCA | | SGKDYTLSITSLQTEDVATYYCQQYWSTPFTFG | |
| | RDGGYWGQGTLVTVSA | | SGTKLEIK | |
| SCT-Ga442 | QVQLKQSGAELVRPGASVKLSCKTSGYIFTSYW | 365 | DIQMTQSPASQSASLGESVTITCLASQTIGTWL | 677 |
| | IHWVKQRSGQGLEWIARIYPGIGSTDYNEKFKG | | AWYQQKPGKSPQLLIYAATSLADGVPSRFSGSG | |
| | KATLTADKSSSTAYMQLSSLKSEDSAVYFCEVP | | SGTKFSFKISSLQAEDFVSYYCQQLYNTPLTFG | |
| | IGTVDYWGQGTTLTVSS | | AGTKLELK | |
| SCT-Ga443 | QVTLKESGPGILQPSQTLSLTCSFSGFSLSTSG | 366 | DWMTQTPLTLSVTIGQPASISCKSSQSLLDSD | 678 |
| | MGVGWIRQPSGKGLEWLAHIWWDDVKRYNPALK | | GKTYLNWLLQRPGQSPKRLIYLVSKLDSGVPDR | |
| | SRLTISKDASSSQVFLKTASVDTADTATYYCAR | | FTGSGSGTDFTLKISRVEAEDLGIYYCWQGTHF | |
| | LGVYYRYDGDYWGQGTTLTVSS | | PQTFGGGTKLEIK | |
| SCT-Ga444 | EVKLVESGGGLVQPGGSLRLSCATSGFTFIDYY | 367 | DIQMTQSSSYLSVSLGGRVTITCKASDHINNWL | 679 |
| | MSWVRQPPGKALEWLALIRNKANGYTTEYSVSV | | AWYQQKPGNAPRLLISGATSLETGIPSRFSGSG | |
| | KGRFTISRDNSQSILYLQMNTLRAEDSATYYCA | | SGKDYTLSITSLQTEDVATYYCQQYWSTPFTFG | |
| | RDGGYWGQGTLVTVSA | | SGTKLEIK | |
| SCT-Ga445 | QVQLKESGPGLVAPAQSLSITCTVSGFLITAYG | 368 | DIQMTQSPSSLSASLGERVSLTCRASQEISGFL | 680 |
| | VNWVRQPPGKGLEWLGMIWGDGSTDYNSALKSR | | SWLQQKPDGTIKRLIYAASTLDSGVPKRFSGTR | |
| | LSISKDSSKSQVFLKMNSLQTDDTARYYCARYD | | SGSDYSLTISSLESEDFADYYCLQYASYPPTFG | |
| | YYGMDYWGQGTSVTVSS | | GGTKLEIR | |
| SCT-Ga446 | EVNLVESGGGLVQPGGSRRLSCATSGFTFTNYY | 369 | DIQMTQSSSSFSVSLGDRVTITCKASEDIYNRL | 681 |
| | MTWVRQPPGKALEWLGFIRNKPYGYTTEYNESV | | AWYQQKPGNAPRLLISGATSLETGVPSRFSGSG | |
| | KGRFTISRDNSQSILYLQMNTLRAEDSATYYCA | | SGKDYTLSITSLQTEDVATYYCQQYWSTPWTFG | |
| | AGLDYWGQGTTLTVSS | | GGTKLEIK | |
| SCT-Ga447 | EVMLVESGGGLVKPGGSLKLSCAASGFTFSNYA | 370 | DIQMTQSSSYLSVSLGGRVTITCKASDHINNWL | 645 |
| | MSWVRQTPEKRLDWVATISSGGIYTYYPDNVKG | | AWYQQKPGNAPRLLISGATSLETGVPSRFSGSG | |
| | RFSISRDNAKNTLYLQLSSLRSEDTAMYYCARQ | | SGKDYTLSITSLQTEDVATYYCQQYWSTPFTFG | |
| | RTTATDYFDYWGQGTTLTVSS | | SGTKLEIK | |
| SCT-Ga448 | QVQLKQSGAELVRPGASVKLSCKTSGYIFTSYW | 371 | DIQMTQSPASQSASLGESVTITCLASQTIGTWL | 682 |
| | IHWVKQRSGQGLEWIARIYPGTGGTSYNEKFKG | | AWYQQKPGKSPQLLIYAATSLADGVPSRFSGSG | |
| | KATLTADKSSTTAYMQLSSLKSEDSAVYFCEVP | | SGTKFSFKISSLQAEDFVSYYCQQLYSTPLTFG | |
| | IGTVDYWGQGTTLTVSS | | AGTKLELK | |
| SCT-Ga449 | EVKLVESGGGLVQPGGSLRLSCATSGFTFTNYY | 372 | DWMTQTPLTLSVTIGQPASISCKSSQSLLDSD | 381 |
| | MSWVRQPPGKALEWLGFIRNKPYGYTTEYSASV | | GKTYLNWLLQRPGQSPKRLIYLVSKLDSGVPDR | |
| | KGRFTISRDNSQSILYLQMNTLTAEDSATYYCA | | FTGSGSGTDFTLKISRVEAEDLGVYYCWQGTHF | |
| | AGLDYWGQGTTLTVSS | | PYTFGGGTKLEIK | |
| SCT-Ga450 | QVQLKQSGAELVRPGASVKLSCKTSGYIFTSYW | 373 | DIQMTQSPASQSASLGESVTITCLASQTIGTWL | 683 |
| | IHWVKQRSGQGLEWIARIYPGTGSTYYNEKFKG | | AWYQQKPGKSPQLLIYAATSLADGVPSRFSGSG | |
| | KATLTADKSSSTAYMQLSSLKSEDSAVYFCEVP | | SGTKFSFKISSLQAEDFVSYYCQQLYSTPLTFG | |
| | VGTFDYWGQGTTLTVSS | | AGTKLELI | |
| SCT-Ga451 | DVQLQESGPGLVKPSQSLSLTCTVTGYSITSDY | 374 | DIVMTQSHKFMSTSVGDRVSITCKASQDVSTTV | 684 |
| | AWNWIRQFPGNKLDWMGYITYSGDTRYNPSLKS | | AWYQQKPGQSPKPLIYSASYRYTGVPDRFTGSG | |
| | RISITRDTSKNQFFLRLNSVTTEDTATYYCARR | | SGTDFTFTISSVQAEDLAVYYCQQHYSVPWTFG | |
| | EVGQGFTYWGQGTLVTVSA | | GGTKLEIN | |
| SCT-Ga452 | QVQLKESGPGLVAPSQSLSITCTVSGFSLTSFG | 375 | EILLTQSPAIIAASPGVKVTITCSASSSVRYMN | 685 |
| | VHWVRQPPGKGLEWLGVIWADGGTNYNSALMSR | | WYQQKPGSPPKIWIYGISNLASGVPARFSGSGS | |
| | LSISKDNSKSQVFLKMNSLQTDDTAMYYCARDL | | GTSFSFTINSMEAEDVATYYCQQTSSYPLTFGA | |
| | GYLTTAWFAYWGQGTLVTVSA | | GTKLELK | |
| SCT-Ga453 | EVQLQQSGPELVKPGASMKISCKASGYSFTGYI | 376 | DVWTQTPLSLPVSFGDQVSISCRSSQSLANSY | 482 |
| | MNWVKQSHGKNLEWIGLIIPYNGGTSYNQKFKG | | GNTYLSWYLHKPGQSPQLLIYGISNRFSGVPDR | |
| | KATLTVDKSSSTAYMELLSLTSEDSAVYYCTRG | | FSGSGSGTDFTLKISTIKPEDLGMYYCLQGTHQ | |
| | LQRFYAMDYWGQGTSVTVSS | | PPTFGGGTKLEIK | |
| SCT-Ga454 | DVQLQESGPGLVKPSQSLSLTCTVTGYSITSDY | 377 | DIVMTQSHKFMSTSVGDRVSITCKASQDVSTAV | 686 |
| | AWNWIRQFPGNKLEWMGYIVYSGSTNYNPSLKS | | AWYQQKPGQSPKLLIYSASYRYTGVPDRFTGSG | |
| | RISITRDTSKNHFFLQLNSVTAEDTATYYCARR | | SGTDFTFTINSVQAEDLAVYYCQQHYSSPWTFG | |
| | QVGLGFAYWGQGTLVTVSA | | GGTKLEIK | |
| SCT-Ga455 | EVQLQQSGPELVKPGASMKISCKASGYSFTGYT | 378 | DVWTQTPLSLPVSFGDQVSISCRSSQSLANSY | 572 |
| | MSWVKQSHGKNLEWIGLIIPYTGGTSYSQKFKG | | GNTYLSWYLHKPGQSPQLLIYGISNRFSGVPDR | |
| | KATLTVDKSSTTAYMELLSLTSEDSAVYYCARS | | FSGSGSGTDFTLKISTIKPEDLGMYYCLQGTHQ | |
| | RTFAMDYWGQGTSVTVSS | | PWTFGGGTKLEIK | |
| SCT-Ga456 | EVKLEESGGGLVQPGGSMKLSCVASGFTFSQFW | 379 | EILLTQSPAIIAASPGEKVTITCSASSSVSYMN | 667 |
| | MNWVRQSPEKGLEWVAEIRLKSNSYKTQYAESV | | WYQQKPGSSPKIWIYGISNLASGVPARFSGSGS | |
| | KGRFTISRDDSKSSVYLQMNNLRAEDTGIYYCT | | GTSFSFTINSMEAEDVATYYCQQISSYPLTFGA | |
| | RLPIFDYWGQGTTLTVSS | | GTKLELK | |
| SCT-Ga457 | QVQLKQSGPGLVQPSQSLSITCTVSGFSLTRHG | 1366 | DIQLTQSPSSLSASVGDRVTMSCKSSQSVLYSS | 1367 |
| | VHWVRQSPGKGLEWLGVIWPGGNTDYNTPFTSR | | NQKNFLAWYQQKPGKAPKLLIYWASTRESGVPS | |
| | LSINKDNSKSQVFFKMNSLQSNDTAIYYCARSG | | RFSGSGSGTDFTFTISSLQPEDIATYYCHQYLS | |
| | GYGNFAPYYFDQWGQGTLVTVSA | | SYTFGGGTKLEIK | |
| SCT-Ga458 | QVQLKQSGPGLVQPSQSLSITCTVSGFSLTRHG | 1366 | DIVMTQSPDSLAVSLGERVTMNCKSSQSVLYSS | 1368 |
| | VHWVRQSPGKGLEWLGVIWPGGNTDYNTPFTSR | | NQKNFLAWYQQKPGQSPKLLIYWASTRESGVPD | |
| | LSINKDNSKSQVFFKMNSLQSNDTAIYYCARSG | | RFSGSGSGTDFTLTISSVQAEDVAVYYCHQYLS | |
| | GYGNFAPYYFDQWGQGTLVTVSA | | SYTFGGGTKLEIK | |
| SCT-Ga459 | DVKLVESGGGLVKLGGSLKLSCAASGFTFSSYT | 1369 | AIQMTQSPSSLSASVGDRVTITCQASQNINVWL | 1370 |
| | MSWVRQTPEKRLELVAAISSGGSYTYYLDTVKG | | SWYQQKPGKAPKLLIYKASTLASGVPSRFSGSG | |
| | RFTISRDNAKNTLYLQMSSLKSEDTALFYCTRW | | SGTDFTLTISSLQPDDFATYYCQQGQTYPFTFG | |
| | LLSLYAMDYWGQGTSVTVSS | | GGTKVEIK | |
| SCT-Ga460 | DVKLVESGGGLVKLGGSLKLSCAASGFTFSSYT | 1369 | DIQMTQSPSSLSASVGDRVTITCKASQNINVWL | 1371 |
| | MSWVRQTPEKRLELVAAISSGGSYTYYLDTVKG | | NWYQQKPGKAPKLLIYKASNLQTGVPSRFSGSG | |
| | RFTISRDNAKNTLYLQMSSLKSEDTALFYCTRW | | SGTDFTFTISSLQPEDIATYYCQQGQTYPFTFG | |
| | LLSLYAMDYWGQGTSVTVSS | | QGTKVEIK | |
| SCT-Ga461 | EVQLVESGGGLVQPGGSLRLSCAASGFTFSSYT | 1372 | ATQMTQSPSSLSASVGDRVTITCQASQNINVWL | 1370 |
| | MSWVRQAPGKGLEWVATISSGGSYTYYPDSVKG | | SWYQQKPGKAPKLLIYKASTLASGVPSRFSGSG | |
| | RFTISRDNAKNTLYLQMNSLRAEDTAVYYCTRW | | SGTDFTLTISSLQPDDFATYYCQQGQTYPFTFG | |
| | LLSLYAMDYWGQGTLVTVSS | | GGTKVEIK | |
| SCT-Ga462 | EVQLVESGGGLVQPGGSLRLSCAASGFTFSSYT | 1372 | DIQMTQSPSSLSASVGDRVTITCKASQNINVWL | 1371 |
| | MSWVRQAPGKGLEWVATISSGGSYTYYPDSVKG | | NWYQQKPGKAPKLLIYKASNLQTGVPSRFSGSG | |
| | RFTISRDNAKNTLYLQMNSLRAEDTAVYYCTRW | | SGTDFTFTISSLQPEDIATYYCQQGQTYPFTFG | |
| | LLSLYAMDYWGQGTLVTVSS | | QGTKVEIK | |
| SCT-Ga463 | DVKLVESGGGLVKLGGSLKLSCAASGFAFSSFD | 1373 | AIQMTQSPSSLSASVGDRVTITCQASQNINVWL | 1374 |
| | MSWVRQTPEKRLELVAAISSGGSYTYYLDTVKG | | SWYQQKPGKAPKLLIYKASTLASGVPSRFSGSG | |
| | RFTISRDNAKNTLYLQMSSLKSEDTALFYCTRQ | | SGTDFTLTISSLQPDDFATYYCQQGQSYPWTFG | |
| | DYRYPYIMDYWGQGTSVTVSS | | GGTKVEIK | |
| SCT-Ga464 | DVKLVESGGGLVKLGGSLKLSCAASGFAFSSFD | 1373 | DIQMTQSPSSLSASVGDRVTITCKASQNINVWL | 1375 |
| | MSWVRQTPEKRLELVAAISSGGSYTYYLDTVKG | | NWYQQKPGKAPKLLIYKASNLQTGVPSRFSGSG | |
| | RFTISRDNAKNTLYLQMSSLKSEDTALFYCTRQ | | SGTDFTFTISSLQPEDIATYYCQQGQSYPWTFG | |
| | DYRYPYIMDYWGQGTSVTVSS | | QGTKVEIK | |
| SCT-Ga465 | EVQLVESGGKLLKPGGSLKLSCAASGFAFSSFD | 1376 | AIQMTQSPSSLSASVGDRVTITCQASQNINVWL | 1374 |
| | MSWFRQSPEKRLEWVAEISSGGSYTYYPDTVTG | | SWYQQKPGKAPKLLIYKASTLASGVPSRFSGSG | |
| | RFTISRDNAKNTLYLEMSSLRSEDTAMYYCTRQ | | SGTDFTLTISSLQPDDFATYYCQQGQSYPWTFG | |
| | DYRYPYIMDYWGQGTSVTVSS | | GGTKVEIK | |
| SCT-Ga466 | EVQLVESGGKLLKPGGSLKLSCAASGFAFSSFD | 1376 | DIQMTQSPSSLSASVGDRVTITCKASQNINVWL | 1375 |
| | MSWFRQSPEKRLEWVAEISSGGSYTYYPDTVTG | | NWYQQKPGKAPKLLIYKASNLQTGVPSRFSGSG | |
| | RFTISRDNAKNTLYLEMSSLRSEDTAMYYCTRQ | | SGTDFTFTISSLQPEDIATYYCQQGQSYPWTFG | |
| | DYRYPYIMDYWGQGTSVTVSS | | QGTKVEIK | |
| SCT-Ga467 | QVQLQQPGAELVKPGASVKMSCKASGYAFTDYL | 1377 | DIVMTQSPDSLAVSLGERATINCKSSQSLLNSG | 1378 |
| | MHWVKQTPGRGLEWIGAINPGSGGTSYNQKFKG | | NQKNYLAWYQQKPGQPPKLLIYGASTRESGVPD | |
| | KATLTADKSSSTAYMQLSSLTSEDSAVYYCARY | | RFSGSGSGTDFTLTISSLQAEDVAVYYCQNYHS | |
| | HYYGSGLFPYWGAGTTVTVSA | | YPFTFGGGTKLEIK | |
| SCT-Ga468 | QVQLQQPGAELVKPGASVKMSCKASGYAFTDYL | 1377 | DIVMTQSPDSLAVSLGERVTMNCKSSQSLLNSG | 1379 |
| | MHWVKQTPGRGLEWIGAINPGSGGTSYNQKFKG | | NQKNYLAWYQQKPGQSPKLLIYGASTRESGVPD | |
| | KATLTADKSSSTAYMQLSSLTSEDSAVYYCARY | | RFSGSGSGTDFTLTISSVQAEDVAVYYCQNYHS | |
| | HYYGSGLFPYWGAGTTVTVSA | | YPFTFGGGTKLEIK | |
| SCT-Ga469 | QVQLVQSGAEVKKPGASVKVSCKASGYAFTDYL | 1380 | DIVMTQSPDSLAVSLGERATINCKSSQSLLNSG | 1378 |
| | IEWVRQAPGQGLEWIGVINPGSGGTNYNEKFKG | | NQKNYLAWYQQKPGQPPKLLIYGASTRESGVPD | |
| | RATITADKSTSTAYMELSSLRSEDTAVYFCARY | | RFSGSGSGTDFTLTISSLQAEDVAVYYCQNYHS | |
| | HYYGSGLFPYWGQGTTVTVSS | | YPFTFGGGTKLEIK | |
| SCT-Ga470 | QVQLVQSGAEVKKPGASVKVSCKASGYAFTDYL | 1380 | DIVMTQSPDSLAVSLGERVTMNCKSSQSLLNSG | 1379 |
| | IEWVRQAPGQGLEWIGVINPGSGGTNYNEKFKG | | NQKNYLAWYQQKPGQSPKLLIYGASTRESGVPD | |
| | RATITADKSTSTAYMELSSLRSEDTAVYFCARY | | RFSGSGSGTDFTLTISSVQAEDVAVYYCQNYHS | |
| | HYYGSGLFPYWGQGTTVTVSS | | YPFTFGGGTKLEIK | |
| SCT-Ga471 | QVQLQQPGAELVKPGASVKMSCKASGYTFSNYW | 1381 | DIQMTQSPSSLSASVGDRVTITCRASQGIGNYL | 1382 |
| | MHWVKQTPGRGLEWIGAILPGSGSTSYNQKFKG | | AWYQQKPGKAPKLLIYYTSKIHSGVPSRFSGSG | |
| | KATLTADKSSSTAYMQLSSLTSEDSAVYYCARQ | | SGTDYTFTISSLQPEDIATYYCHQYSKLPYTFG | |
| | KYGNFYYFDFWGAGTTVTVSA | | QGTKVEIK | |
| SCT-Ga472 | QVQLQQPGAELVKPGASVKMSCKASGYTFSMYW | 1381 | DIQMTQSPSSLSASVGDRVTITCSASQGIGNYL | 1383 |
| | MHWVKQTPGRGLEWIGAILPGSGSTSYNQKFKG | | NWYQQKPGKAPKVLIYYTSSLHSGVPSRFSGSG | |
| | KATLTADKSSSTAYMQLSSLTSEDSAVYYCARQ | | SGTDFTLTISSLQPEDFATYYCHQYSKLPYTFG | |
| | KYGNFYYFDFWGAGTTVTVSA | | QGTKVEIK | |
| SCT-Ga473 | QVQLVQSGAEVKKPGASVKVSCKASGYTFSNYW | 1384 | DIQMTQSPSSLSASVGDRVTITCRASQGIGNYL | 1382 |
| | IQWVRQAPGQGLEWMGEILPGSGSTEYTENFKD | | AWYQQKPGKAPKLLIYYTSKIHSGVPSRFSGSG | |
| | RVTMTRDTSTSTVYMELSSLRSEDTAVYYCARQ | | SGTDYTFTISSLQPEDIATYYCHQYSKLPYTFG | |
| | KYGNFYYFDFWGQGTLVTVSS | | QGTKVEIK | |
| SCT-Ga474 | QVQLVQSGAEVKKPGASVKVSCKASGYTFSNYW | 1384 | DIQMTQSPSSLSASVGDRVTITCSASQGIGNYL | 1383 |
| | IQWVRQAPGQGLEWMGEILPGSGSTEYTENFKD | | NWYQQKPGKAPKVLIYYTSSLHSGVPSRFSGSG | |
| | RVTMTRDTSTSTVYMELSSLRSEDTAVYYCARQ | | SGTDFTLTISSLQPEDFATYYCHQYSKLPYTFG | |
| | KYGNFYYFDFWGQGTLVTVSS | | QGTKVEIK | |
| SCT-Ga475 | QVQLQQPGAELVKPGASVKMSCKASGYAFTNYL | 1385 | DIVMTQSPDSLAVSLGERATINCKSSQSLLNSG | 1386 |
| | MHWVKQTPGRGLEWIGAINPGSGGTSYNQKFKG | | IQKNYLAWYQQKPGQPPKLLIYGASTRESGVPD | |
| | KATLTADKSSSTAYMQLSSLTSEDSAVYYCART | | RFSGSGSGTDFTLTISSLQAEDVAVYYCQNDHR | |
| | GVYGNFLIFDYWGAGTTVTVSA | | YPFTFGGGTKLEIK | |
| SCT-Ga476 | QVQLQQPGAELVKPGASVKMSCKASGYAFTNYL | 1385 | DIVMTQSPDSLAVSLGERVTMNCKSSQSLLNSG | 1387 |
| | MHWVKQTPGRGLEWIGAINPGSGGTSYNQKFKG | | IQKNYLAWYQQKPGQSPKLLIYGASTRESGVPD | |
| | KATLTADKSSSTAYMQLSSLTSEDSAVYYCART | | RFSGSGSGTDFTLTISSVQAEDVAVYYCQNDHR | |
| | GVYGNFLIFDYWGAGTTVTVSA | | YPFTFGGGTKLEIK | |
| SCT-Ga477 | QVQLVQSGAEVKKPGASVKVSCKASGYAFTNYL | 1388 | DIVMTQSPDSLAVSLGERATINCKSSQSLLNSG | 1386 |
| | IEWVRQAPGQGLEWIGVINPGSGGTNYNEKFKG | | IQKNYLAWYQQKPGQPPKLLIYGASTRESGVPD | |
| | RATITADKSTSTAYMELSSLRSEDTAVYFCART | | RFSGSGSGTDFTLTISSLQAEDVAVYYCQNDHR | |
| | GVYGNFLIFDYWGQGTTVTVSS | | YPFTFGGGTKLEIK | |
| SCT-Ga478 | QVQLVQSGAEVKKPGASVKVSCKASGYAFTNYL | 1388 | DIVMTQSPDSLAVSLGERVTMNCKSSQSLLNSG | 1387 |
| | TEWVRQAPGQGLEWTGVTNPGSGGTNYNEKFKG | | IQKNYLAWYQQKPGQSPKLLIYGASTRESGVPD | |
| | RATITADKSTSTAYMELSSLRSEDTAVYFCART | | RFSGSGSGTDFTLTISSVQAEDVAVYYCQNDHR | |
| | GVYGNFLIFDYWGQGTTVTVSS | | YPFTFGGGTKLEIK | |
| SCT-Ga479 | QVQLKQSGPGLVQPSQSLSITCTVSGFSLTSYG | 1389 | DIQMTQSPSSLSASVGDRVTITCGASENIYSNL | 1390 |
| | VHWVRQSPGKGLEWLGVIWAGGTTDYNTPFTSR | | NWYQQKPGKAPKLLIYAATNLADGVPSRFSGSG | |
| | LSINKDNSKSQVFFKMNSLQSNDTAIYYCARFP | | SGTDFTLTISSLQPEDFATYYCQHFWGTPYTFG | |
| | SYRESMDYWGQGTLVTVSA | | QGTKVEIK | |
| SCT-Ga480 | QVQLQQPGAELVKPGASVKMSCKASGYAFTNYL | 1391 | DIQMTQSPSSLSASVGDRVTITCRASQDVSTAV | 1392 |
| | MHWVKQTPGRGLEWIGAINPGSGGTSYNQKFKG | | AWYQQKPGKAPKLLIYSASFLYSGVPSRFSGSG | |
| | KATLTADKSSSTAYMQLSSLTSEDSAVYYCARR | | SGTDFTLTISSLQPEDFATYYCQQHYSSPRTFG | |
| | GDKYGSAWFAYWGAGTTVTVSA | | QGTKVEIK | |
| SCT-Ga481 | QVQLQQPGAELVKPGASVKMSCKASGYAFTNYL | 1391 | DIVMTQSQRFMSTTVGDRVSITCKASQDVSTAV | 1393 |
| | MHWVKQTPGRGLEWIGAINPGSGGTSYNQKFKG | | AWYQQKPGQSPKLLIYSASNRYTGVPDRFTGSG | |
| | KATLTADKSSSTAYMQLSSLTSEDSAVYYCARR | | SGTDFTLTISNMQSEDLADFFCQQHYSSPRTFG | |
| | GDKYGSAWFAYWGAGTTVTVSA | | GGTKLEIK | |
| SCT-Ga482 | QVQLVQSGAEVKKPGASVKVSCKASGYAFTNYL | 1394 | DIQMTQSPSSLSASVGDRVTITCRASQDVSTAV | 1392 |
| | IEWVRQAPGQGLEWIGVINPGSGGTNYNEKFKG | | AWYQQKPGKAPKLLIYSASFLYSGVPSRFSGSG | |
| | RATITADKSTSTAYMELSSLRSEDTAVYFCARR | | SGTDFTLTISSLQPEDFATYYCQQHYSSPRTFG | |
| | GDKYGSAWFAYWGQGTTVTVSS | | QGTKVEIK | |
| SCT-Ga483 | QVQLVQSGAEVKKPGASVKVSCKASGYAFTNYL | 1394 | DIVMTQSQRFMSTTVGDRVSITCKASQDVSTAV | 1393 |
| | IEWVRQAPGQGLEWIGVINPGSGGTNYNEKFKG | | AWYQQKPGQSPKLLIYSASNRYTGVPDRFTGSG | |
| | RATITADKSTSTAYMELSSLRSEDTAVYFCARR | | SGTDFTLTISNMQSEDLADFFCQQHYSSPRTFG | |
| | GDKYGSAWFAYWGQGTTVTVSS | | GGTKLEIK | |
| SCT-Ga484 | QVQLQQSGABVKKPGASVKVSCKASGYAFTNYL | 1395 | DIVMTQSPDSLAVSLGERATINCKSSQSLLNSG | 1386 |
| | IEWVRQAPGQGLEWIGVINPGSGGSKYNEKFKG | | IQKNYLAWYQQKPGQPPKLLIYGASTRESGVPD | |
| | RATITADKSTSTAYMELSSLRSEDTAVYFCART | | RFSGSGSGTDFTLTISSLQAEDVAVYYCQNDHR | |
| | GVYGNFLIFDYWGQGTTVTVSS | | YPFTFGGGTKLEIK | |
| SCT-Ga485 | QVQLVQSGAEVKKPGASVKVSCKASGYAFTNYL | 1396 | DIVMTQSPDSLAVSLGERATINCKSSQSLLNSG | 1386 |
| | IEWVKQAPGQGLEWIGVINPGSGGSKYNEKFKG | | IQKNYLAWYQQKPGQPPKLLIYGASTRESGVPD | |
| | RATITADKSTSTAYMELSSLRSEDTAVYFCART | | RFSGSGSGTDFTLTISSLQAEDVAVYYCQNDHR | |
| | GVYGNFLIFDYWGQGTTVTVSS | | YPFTFGGGTKLEIK | |
| SCT-Ga486 | QVQLQQSGAEVKKPGASVKVSCKASGYAFTNYL | 1397 | DIVMTQSPDSLAVSLGERATINCKSSQSLLNSG | 1386 |
| | IEWVKQAPGQGLEWIGVINPGSGGSKYNEKFKG | | IQKNYLAWYQQKPGQPPKLLIYGASTRESGVPD | |
| | RATITADKSTSTAYMELSSLRSEDTAVYFCART | | RFSGSGSGTDFTLTISSLQAEDVAVYYCQNDHR | |
| | GVYGNFLIFDYWGQGTTVTVSS | | YPFTFGGGTKLEIK | |
| SCT-Ga487 | QVQLQQPGAELVKPGASVKMSCKATGYTFSNYW | 1398 | AIQMTQSPSSLSASVGDRVTITCRASQGIGNYL | 1399 |
| | IEWVKQTPGRGLEWIGEILPGSGSSYYNQKFKG | | NWYQQKPGKAPKLLIYYTSSLHSGVPSRFSGSG | |
| | KATLTADKSSSTAYMQLSSLTSEDSAVYYCARQ | | SGTDYTFTISSLQPEDIATYYCHQYSKLPYTFG | |
| | KYGNFYYFDFWGAGTTVTVSA | | QGTKVEIK | |
| SCT-Ga488 | QVQLVQSGAEVKKPGASVKVSCKASGYTFSMYW | 1400 | AIQMTQSPSSLSASVGDRVTITCRASQGTGNYL | 1399 |
| | IEWVRQAPGQGLEWIGEILPGSGSSYYNENFKD | | NWYQQKPGKAPKLLIYYTSSLHSGVPSRFSGSG | |
| | RVTMTRDTSTSTVYMELSSLRSEDTAVYYCARQ | | SGTDYTFTISSLQPEDIATYYCHQYSKLPYTFG | |
| | KYGNFYYFDFWGQGTLVTVSS | | QGTKVEIK | |
| SCT-Ga489 | QVQLVQSGAEVKKPGASVKVSCKATGYTFSNYW | 1401 | AIQMTQSPSSLSASVGDRVTITCRASQGIGNYL | 1399 |
| | IEWVRQAPGQGLEWTGEILPGSGSSYYNENFKD | | NWYQQKPGKAPKLLTYYTSSLHSGVPSRFSGSG | |
| | RVTMTRDTSTSTVYMELSSLRSEDTAVYYCARQ | | SGTDYTFTISSLQPEDIATYYCHQYSKLPYTFG | |
| | KYGNFYYFDFWGQGTLVTVSS | | QGTKVEIK | |
| SCT-Ga490 | QVQLQQPGAELVKPGASVKMSCKATGYTFSNYW | 1398 | DIQMTQSPSSLSASVGDRVTITCRASQGIGNYL | 1382 |
| | IEWVKQTPGRGLEWTGEILPGSGSSYYNQKFKG | | AWYQQKPGKAPKLLIYYTSKIHSGVPSRFSGSG | |
| | KATLTADKSSSTAYMQLSSLTSEDSAVYYCARQ | | SGTDYTFTISSLQPEDIATYYCHQYSKLPYTFG | |
| | KYGNFYYFDFWGAGTTVTVSA | | QGTKVEIK | |
| SCT-Ga491 | QVQLVQSGAEVKKPGASVKVSCKASGYTFSNYW | 1400 | DIQMTQSPSSLSASVGDRVTTTCRASQGTGNYL | 1382 |
| | IEWVRQAPGQGLEWIGEILPGSGSSYYNENFKD | | AWYQQKPGKAPKLLIYYTSKIHSGVPSRFSGSG | |
| | RVTMTRDTSTSTVYMELSSLRSEDTAVYYCARQ | | SGTDYTFTTSSLQPEDTATYYCHQYSKLPYTFG | |
| | KYGNFYYFDFWGQGTLVTVSS | | QGTKVEIK | |
| SCT-Ga492 | QVQLVQSGAEVKKPGASVKVSCKATGYTFSNYW | 1401 | DIQMTQSPSSLSASVGDRVTTTCRASQGIGNYL | 1382 |
| | IEWVRQAPGQGLEWIGEILPGSGSSYYNENFKD | | AWYQQKPGKAPKLLIYYTSKIHSGVPSRFSGSG | |
| | RVTMTRDTSTSTVYMELSSLRSEDTAVYYCARQ | | SGTDYTFTISSLQPEDTATYYCHQYSKLPYTFG | |
| | KYGNFYYFDFWGQGTLVTVSS | | QGTKVEIK | |
| SCT-Ga493 | EVKLVESGGGLVQPGGSLRLSCAASGFAFSSFD | 1402 | ATQMTQSPSSLSASVGDRVTITCQASQNINVWL | 1374 |
| | MSWVRQAPGKGLEWVSVISSGGSYTYYADSVKG | | SWYQQKPGKAPKLLTYKASTLASGVPSRFSGSG | |
| | RFTISRDNSKNTLYLQMNSLRAEDTAVYYCTRQ | | SGTDFTLTISSLQPDDFATYYCQQGQSYPWTFG | |
| | DYRYPYTMDYWGQGTLVTVSS | | GGTKVEIK | |
| SCT-Ga494 | EVKLVESGGGLVQPGGSLRLSCAASGFAFSSFD | 1402 | DIQMTQSPSSLSASVGDRVTITCHASQNINVWL | 1403 |
| | MSWVRQAPGKGLEWVSVISSGGSYTYYADSVKG | | SWYQQKPGKAPKLLTYKASTLASGVPSRFSGSG | |
| | RFTISRDNSKNTLYLQMNSLRAEDTAVYYCTRQ | | SGTDFTLTISSLQPDDFATYYCQQGQSYPWTFG | |
| | DYRYPYTMDYWGQGTLVTVSS | | GGTKVEIK | |
| SCT-Ga495 | EVKLVESGGGLVQPGGSLRLSCAASGFAFSSFD | 1404 | AIQMTQSPSSLSASVGDRVTITCQASQNINVWL | 1374 |
| | MSWVRQAPGKGLEWVAVISSGGSYTFYPDSVKG | | SWYQQKPGKAPKLLTYKASTLASGVPSRFSGSG | |
| | RFTISRDNSKNTLYLQMNSLRAEDTALYFCTRQ | | SGTDFTLTISSLQPDDFATYYCQQGQSYPWTFG | |
| | DYRYPYTMDYWGQGTLVTVSS | | GGTKVEIK | |
| SCT-Ga496 | EVKLVESGGGLVQPGGSLRLSCAASGFAFSSFD | 1404 | DIQMTQSPSSLSASVGDRVTITCHASQNINVWL | 1403 |
| | MSWVRQAPGKGLEWVAVISSGGSYTFYPDSVKG | | SWYQQKPGKAPKLLIYKASTLASGVPSRFSGSG | |
| | RFTISRDNSKNTLYLQMNSLRAEDTALYFCTRQ | | SGTDFTLTISSLQPDDFATYYCQQGQSYPWTFG | |
| | DYRYPYIMDYWGQGTLVTVSS | | GGTKVEIK | |
| SCT-Ga497 | QVQLQQSGAEVKKPGASVKVSCKASGYAFTNYL | 1405 | DIVMTQSPSSLSASVGDRVTITCKASQDVSTAV | 1406 |
| | TEWVKQAPGQGLEWIGVINPGSGGNNYNEKFKG | | AWYQQKPGKAPKLLIYSASYRYSGVPSRFSGSG | |
| | RATTTADKSTSTAYMELSSLRSEDTAVYFCARR | | SGTDFTLTISSLQPEDFATYYCQQHYSSPRTFG | |
| | GDKYGSAWFAYWGQGTTVTVSA | | QGTKVEIK | |
| SCT-Ga498 | QVQLQQSGAEVKKPGASVKVSCKASGYAFTNYL | 1405 | DIVMTQSQRFMSTTVGDRVSITCKASQDVSTAV | 1407 |
| | IEWVKQAPGQGLEWIGVINPGSGGNNYNEKFKG | | AWYQQKPGQSPKLLIYSASYRYTGVPDRFTGSG | |
| | RATITADKSTSTAYMELSSLRSEDTAVYFCARR | | SGTDFTLTISNMQSEDLAVYYCQQHYSSPRTFG | |
| | GDKYGSAWFAYWGQGTTVTVSA | | GGTKLEIK | |

[0044] The preceding merely illustrates the principles of the disclosure. It will be appreciated that those skilled in the art will be able to devise various arrangements which, although not explicitly described or shown herein, embody the principles of the disclosure and are included within its spirit and scope. Furthermore, all examples and conditional language recited herein are principally intended to aid the reader in understanding the principles of the disclosure and the concepts contributed by the inventors to furthering the art and are to be construed as being without limitation to such specifically recited examples and conditions. Moreover, all statements herein reciting principles, aspects, and embodiments of the disclosure as well as specific examples thereof, are intended to encompass both structural and functional equivalents thereof. Additionally, it is intended that such equivalents include both currently known equivalents and equivalents developed in the future, i.e., any elements developed that perform the same function, regardless of structure. The scope of the present disclosure, therefore, is not intended to be limited to the exemplary embodiments shown and described herein. Rather, the scope and spirit of present disclosure is embodied by the appended claims.

### REFERENCES CITED

### Other References

[0045] Boles, K. S., Vermi, W., Facchetti, F., Fuchs, A., Wilson, T. J., Diacovo, T. G., Cella, M., and Colonna, M. (2009). A novel molecular interaction for the adhesion of follicular CD4 T cells to follicular DC. Eur. J. Immunol. 39, 695-703.
[0046] Gao, J., Zheng, Q., Xin, N., Wang, W., and Zhao, C. (2017). CD155, an onco-immunologic molecule in human tumors. Cancer Sci. 108, 1934-1938.
[0047] Gur, C., Ibrahim, Y., Isaacson, B., Yamin, R., Abed, J., Gamliel, M., Enk, J., Bar-On, Y., Stanietsky-Kaynan, N., Coppenhagen-Glazer, S., et al. (2015). Binding of the Fap2 protein of Fusobacterium nucleatum to human inhibitory receptor TIGIT protects tumors from immune cell attack. Immunity 42, 344-355.
[0048] Hampton, T. (2015). Bacteria Protect Colorectal Cancer Cells From Immune Destruction. JAMA 313, 1305.
[0049] Johnston, R. J., Comps-Agrar, L., Hackney, J., Yu, X., Huseni, M., Yang, Y., Park, S., Javinal, V., Chiu, H., Irving, B., et al. (2014). The immunoreceptor TIGIT regulates antitumor and antiviral CD8(+) T cell effector function. Cancer Cell 26, 923-937.
[0050] Johnston, R. J., Yu, X., and Grogan, J. L. (2015). The checkpoint inhibitor TIGIT limits antitumor and antiviral CD8+ T cell responses. Oncoimmunology 4, e1036214.
[0051] Joller, N., Lozano, E., Burkett, P. R., Patel, B., Xiao, S., Zhu, C., Xia, J., Tan, T. G., Sefik, E., Yajnik, V., et al. (2014). Treg cells expressing the coinhibitory molecule TIGIT selectively inhibit proinflammatory Th1 and Th17 cell responses. Immunity 40, 569-581.
[0052] Levin, S. D., Taft, D. W., Brandt, C. S., Bucher, C., Howard, E. D., Chadwick, E. M., Johnston, J., Hammond, A., Bontadelli, K., Ardourel, D., et al. (2011). Vstm3 is a member of the CD28 family and an important modulator of T-cell function. Eur. J. Immunol. 41, 902-915.
[0053] Lozano, E., Dominguez-Villar, M., Kuchroo, V., and Hafler, D. A. (2012). The TIGIT/CD226 axis regulates human T cell function. J. Immunol. Baltim. Md 1950 188, 3869-3875.
[0054] Stanietsky, N., Simic, H., Arapovic, J., Toporik, A., Levy, O., Novik, A., Levine, Z., Beiman, M., Dassa, L., Achdout, H., et al. (2009). The interaction of TIGIT with PVR and PVRL2 inhibits human NK cell cytotoxicity. Proc. Natl. Acad. Sci. U.S.A 106, 17858-17863.
[0055] Stengel, K. F., Harden-Bowles, K., Yu, X., Rouge, L., Yin, J., Comps-Agrar, L., Wiesmann, C., Bazan, J. F., Eaton, D. L., and Grogan, J. L. (2012). Structure of TIGIT immunoreceptor bound to poliovirus receptor reveals a cell-cell adhesion and signaling mechanism that requires cis-trans receptor clustering. Proc. Natl. Acad. Sci. U.S.A 109, 5399-5404.
[0056] Yu, X., Harden, K., Gonzalez, L. C., Francesco, M., Chiang, E., Irving, B., Tom, I., Ivelja, S.,
[0057] Refino, C. J., Clark, H., et al. (2009). The surface protein TIGIT suppresses T cell activation by promoting the generation of mature immunoregulatory dendritic cells. Nat. Immunol. 10, 48-57.

1. An antibody or an antigen binding fragment thereof that binds human T cell immunoreceptor with Ig and ITIM domains (TIGIT) comprising SEQ ID NO: 1, the antibody or the antigen binding fragment thereof comprising:
a HCDR1 having the amino acid sequence of SEQ ID NO:804, a HCDR2 having the amino acid sequence of SEQ ID NO:814, a HCDR3 having the amino acid sequence of SEQ ID NO:1321, a LCDR1 having the amino acid sequence of SEQ ID NO:790, a LCDR2 having the amino acid sequence of SEQ ID NO:791, and a LCDR3 having the amino acid sequence of SEQ ID NO:1322.

2. (canceled)

3. An antibody or the antigen binding fragment thereof that binds human T cell immunoreceptor with Ig and ITIM domains (TIGIT) comprising SEQ ID NO: 1, the antibody comprising:
a) a heavy chain variable domain (VH) having the amino acid sequence of SEQ ID NO: 1372, and a light chain variable domain (VL) having the amino acid sequence of SEQ ID NO:1370; or
b) a VH having the amino acid sequence of SEQ ID NO:357, and a VL having the amino acid sequence of SEQ ID NO:673.

4. The antibody or the antigen binding fragment thereof of claim 3, wherein the VH has the amino acid sequence of SEQ ID NO:1372, and the VL has the amino acid sequence of SEQ ID NO:1370.

5. The antibody or the antigen binding fragment thereof of claim 3, wherein the VH has the amino acid sequence of SEQ ID NO:357, and the VL has the amino acid sequence of SEQ ID NO:673.

6. An antibody or the antigen binding fragment thereof that binds human T cell immunoreceptor with Ig and ITIM domains (TIGIT) comprising SEQ ID NO: 1, the antibody or the antigen binding fragment thereof comprising:
a) a heavy chain comprising the amino acid sequence of SEQ ID NO: 1372 and a light chain comprising the amino acid sequence of SEQ ID NO:1370; or
b) a heavy chain comprising the amino acid sequence of SEQ ID NO: 357 and a light chain comprising the amino acid sequence of SEQ ID NO:673.

7. The antibody or the antigen binding fragment thereof of claim 6, wherein the heavy chain comprises the amino acid sequence of SEQ ID NO:1372 and the light chain comprises the amino acid sequence of SEQ ID NO:1370.

8. The antibody or the antigen binding fragment thereof of claim 6, wherein the heavy chain comprises the amino acid sequence of SEQ ID NO:357 and the light chain comprises the amino acid sequence of SEQ ID NO:673.

9. A pharmaceutical composition comprising the antibody or the antigen binding fragment thereof of claim 1.

10. A kit comprising the antibody or the antigen binding fragment thereof of claim 1.

11. The antibody or the antigen binding fragment thereof of claim 1, comprising:
a) a heavy chain variable domain (VH) comprising the amino acid sequence of SEQ ID NO: 1372 or an amino acid sequence that is at least 80% identical thereto, and a light chain variable domain (VL) having the amino acid sequence of SEQ ID NO: 1370 or an amino acid sequence that is at least 80% identical thereto; or
b) a VH having the amino acid sequence of SEQ ID NO: 357 or an amino acid sequence that is at least 80% identical thereto, and a VL having the amino acid sequence of SEQ ID NO:673 or an amino acid sequence that is at least 80% identical thereto.

12. The antibody of claim 1, which comprises a full-length immunoglobulin.

13. The antigen binding fragment thereof of claim 1, wherein the antibody fragment comprises any one of: a diabody, a single-chain antibody molecule, an Fab, an Fab′, an F(ab′)₂, an Fv, or a scFv.

14. A method of treating a TIGIT-expressing cancer in a subject, comprising administering the antibody or the antigen binding fragment thereof of claim 1 to the subject.

15. A method of treating a TIGIT-expressing cancer in a subject, comprising administering the antibody or the antigen binding fragment thereof of claim 11 to the subject.

16. A method of determining whether or not a subject is amenable to treatment with a TIGIT-specific anti-cancer therapeutic, comprising contacting the antibody or the antigen binding fragment thereof of claim 1 with a sample and determining binding of the antibody to the sample.

17. The method of claim 16, wherein the contacting comprises a method selected from: an enzyme-linked immunosorbent assays (ELISA), a Western blot, an immunohistochemistry, an immunocytochemistry, a flow cytometry and fluorescence-activated cell sorting (FACS), an immunoprecipitation, or an enzyme-linked immunospot assays (ELISPOT).

The application's sequence listing, which the Patent Office published only in electronic form, follows.

SEQUENCE LISTING (1407 sequences)

SEQ ID NO: 1 - protein, 244 aa, Homo sapiens
MRWCLLLIWAQGLRQAPLASGMMTGTIETTGNISAEKGGSIILQCHLSSTTAQVTQVNWEQQDQLLAICNADLGWHISPSFKDRVAPGPGLGLTLQSLTVNDTGEYFCIYHTYPDGTYTGRIFLEVLESSVAEHGARFQIPLLGAMAATLVVICTAVIVVVALTRKKKALRIHSVEGDLRRKSAGQEEWSPSAPSPPGSCVQAEAAPAGLCGEQRGEDCAELHDYFNVLSYRSLGNCSFFTETG

SEQ ID NO: 2 - protein, 138 aa, Artificial Sequence
  Human TIGIT His tagged protein sequence
MMTGTIETTGNISAEKGGSIILQCHLSSTTAQVTQVNWEQQDQLLAICNADLGWHISPSFKDRVAPGPGLGLTLQSLTVNDTGEYFCIYHTYPDGTYTGRIFLEVLESSVAEHGARFQIPGGGSGGGSHHHHHHHHHH

SEQ ID NO: 3 - protein, 351 aa, Artificial Sequence
  Human TIGIT Human Fc tagged protein sequence
MMTGTIETTGNISAEKGGSIILQCHLSSTTAQVTQVNWEQQDQLLAICNADLGWHISPSFKDRVAPGPGLGLTLQSLTVNDTGEYFCIYHTYPDGTYTGRIFLEVLESSVAEHGARFQIPPKSSDKTHTCPPCPAPELLGGPSVFLFPPKPKDTLMISRTPEVTCVVVDVSHEDPEVKFNWYVDGVEVHNAKTKPREEQYNSTYRVVSVLTVLHQDWLNGKEYKCKVSNKALPAPIEKTISKAKGQPREPQVYTLPPSRDELTKNQVSLTCLVKGFYPSDIAVEWESNGQPENNYKTTPPVLDSDGSFFLYSKLTVDKSRWQQGNVFSCSVMHEALHNHYTQKSLSLSPGK

SEQ ID NO: 4 - protein, 121 aa, Mus musculus
QVQLQQSGAELVRPGTSVKVSCKASGYAFTNYLIEWVKQRPGQGLEWIGVINPGSGGSKYNEKFKGKTTLTADKSSSTAYMQLSSLTSEDSAVYFCARTGVYGNFLIFDYWGQGTTLTVSS

SEQ ID NO: 5 - protein, 118 aa, Mus musculus
DVQLQVSGPALVKPSQTVSLTCTVTGYSITNGNHWWNWIRQVSGSKLEWIGYITSSGRTDSNPSLKSRISITRDTSKNQLFLQLNSVTTEDIATYYCAREGGWLPPVWGTGTTVTVSS

SEQ ID NO: 6 - protein, 118 aa, Mus musculus
DVQLQESGPALVKPSQTVSLTCTVTGYSITNGNHWWNWIRQVSGSKLEWIGYITSSGRTDSNPSLKSRISITRDTSKNQLFLQLNSVTTEDIATYYCAREGGWLPPVWGTGTTVTVSS

SEQ ID NO: 7 - protein, 118 aa, Mus musculus
DVQLQESGPALVKPSQTVSLTCTVTGYSITNGNHWWNWIRQVSGSKLEWIGYITSSGRTDSNPSLKSRISITRDTSKNQLFLQLNSVITEDIATYYCAREGGWLPPVWGTGTTVTVSS

SEQ ID NO: 8 - protein, 118 aa, Mus musculus
DVQLQESGPALVKPSQTVSLTCTVTGYSITNGNHWWNWIRQVSGSKLEWIGYITSSGRTDSNPSLKSRISITRDTSKNQLFLQLNSVTTEEIATYYCAREGGWLPPVWGTGTTVTVSS

SEQ ID NO: 9 - protein, 118 aa, Mus musculus
DVQLQESGPALVKPSQTVSLTCTVTGYSITNGNHWWNWIRQVSGSKLEWIGYITSSGRTDSNPSLKSRISITRDTSKNQLFLQLTSVTTEDIATYYCAREGGWLPPVWGTGTTVTVSS

SEQ ID NO: 10 - protein, 121 aa, Mus musculus
EVKLVESGGGLVQPGGSLSLSCAASGFTFTDHYMSWVRQPPGKALEWLGFIRNKVNGYTTEYSASVKGRFSISRDNSQSILYLQMNALRAEDSATYYCARYIPYYDPFDYWGQGTTLTVSS

SEQ ID NO: 11 - protein, 118 aa, Mus musculus
DVQLQESGPALVKPSQTVSLTCTVTGYSITNGNHWWNWIRQVSGSKLEWIGYITSSGRTDSNPSLKSRISITRDTSKNQFFLQLNSVPAEDIATYYCSREGGWLPPVWGTGTTVTVSS

SEQ ID NO: 12 - protein, 113 aa, Mus musculus
EVQLQQSGPVLVKPGASVKMSCKASGYTFTDYYMNWVKQSHGKSLEWIGVINPYNGGTSYNQKFKGKATLTVDKSSSTAYMELNSLTSEDSAVYYCAREGTDWGQGTTLTVSS

SEQ ID NO: 13 - protein, 118 aa, Mus musculus
DVQLQESGPALVKPSQTVSLTCTVTGYSITNGNHWWNWIRQVSGGKLEWIGYITSSGRTDSNPSLKSRISITRDTSKNQLFLQLNSVITEDIATYYCAREGGWLPPVWGTGTTVTVSS

SEQ ID NO: 14 - protein, 118 aa, Mus musculus
DVQLQESGPALVKPSQTVSLTCTVTGYSITNGNHWWNWIRQVSGSKLEWIGYISSSGRIDSNPSLKSRISITRDTSKNQIFLQLNSVTTEDIATYYCAREGGWLPPVWGTGTTVTVSS

SEQ ID NO: 15 - protein, 123 aa, Mus musculus
EVQLVESGGDLVKPGGSLKLSCAASGFTFSNYGMSWVRQTPDKRLEWVATISTGGSYTYYPDSVKGRFTISRDNAKNTLYLQMSSLKSEDTAMYYCARPHYYGSSSGNYFDYWGQGTTLTVSS

SEQ ID NO: 16 - protein, 118 aa, Mus musculus
DVQLQASGPALVKPSQTVSLTCTVTGYSITHGNHWWNWIRQVSGSKLEWIGYISSSGRIDSNPSLKSRISITRDTSKNKLFLQLNSVTSEDIATYYCAREGGWLPPVWGTGTTVTVSS

SEQ ID NO: 17 - protein, 118 aa, Mus musculus
DVQLQESGPALVKPSQTVSLTCTVTGYSITNGNHWWNWIRQVSGSKLEWIGYITSSGRTDSNPSLQSRISITRDTSKNQLFLQLNSVTTEDIATYYCAREGGWLPPVWGTGTTVTVSS

SEQ ID NO: 18 - protein, 118 aa, Mus musculus
DVQLQESGPALVKPSQTVSLTCTVTGYSITNGNHWWNWIRQVSGSKLEWIGYIRSSGSTDSNPSLKSRISITRDTSKNQLFLQLNSVTTEDIGTYYCAREGGWLPPVWGTGTTVTVSS

SEQ ID NO: 19 - protein, 121 aa, Mus musculus
QVQLKESGPGLVAPSQSLSLTCTVSGFSLTSYVISWVRQPPGKGLEWLGIIWTGGGTNFNSALKSRLSISKDNSKSQVFLKMNSLQTDDTARYYCARTRAYYSNWGYFDVWGTGTTVTVSS

SEQ ID NO: 20 - protein, 118 aa, Mus musculus
DVQLQASGPALVKPSQTVSLTCTVTGYSITNGNHWWNWIRQVSGSKLEWIGYISSSGRTDSNPSLKSRISFTRDTSKNQLFLHLNSVTTEDMATYYCAREGGWLPPVWGTGTTVTVSS

SEQ ID NO: 21 - protein, 118 aa, Mus musculus
DVQLQASGPALVKPSQTVSLTCTVTGYSITNGNHWWNWIRQVSGSKLEWIGYITSSGRTDSNPSLKSRISITRDTSKNKLFLQLNSVTNEDIATYYCAREGGWLPPVWGTGTTVTVSS

SEQ ID NO: 22 - protein, 121 aa, Mus musculus
DVQLQESGPGLVKPSQSLSLTCSVTGYSITSGYYWNWIRQFPGNKLEWMGYISYDGSNNYNPSLKNRISITRDTSKNQFFLKLNSVTTEDTATYYCARGLYYDYDDYFDYWGQGTTLTVSS

SEQ ID NO: 23 - protein, 118 aa, Mus musculus
DVQLQESGPALVKPSQTVSLTCTVTGYSITNGNHWWNWIRQVSGGKLEWIGYIRSSGSTDFNPSLKSRISITRDISKNELFLQLNSVTTEDIATYYCTREGGWLPPVWGTGTTVTVSS

SEQ ID NO: 24 - protein, 118 aa, Mus musculus
DVQLQESGPALVKPSQTVSLTCTVTGYSITNGNHWWNWIRQVSGSKLEWIGYITSSGRIDSNPSLKSRISITRDTSKNQLFLQLNSVTTEDIGTYYCAREGGWLPPVWGTGTTVTVSS

SEQ ID NO: 25 - protein, 118 aa, Mus musculus
DVQLQESGPALVKPSQTVSLTCTVTGYSITNGNHWWNWIRQVSGSKLEWIGYISSSGSTDSNPSLNSRISITRDTSKNQLFLQLNSVTTEDIATYYCAREGGWLPPVWGTGTTVTVSS

SEQ ID NO: 26 - protein, 118 aa, Mus musculus
DVQLQESGPALVKPSQTVSLTCTVTGYSITNGNHWWNWIRQVSGSKLEWIGYITSSGRTDSNPSLKRRISITRDTSKNQFFLQLNSVPTDDVATYYCAREGGWLPPVWGTGTTVTVSS

SEQ ID NO: 27 - protein, 118 aa, Mus musculus
DVQLQESGPALVKPSQTVSLTCTVTGYSITNGNHWWNWIRQVSGGKLEWIGYIRSSGSTDSNPSLKSRISITRDISKNELFLQLNSVTTEDIATYYCTREGGWLPPVWGTGTTVTVSS

SEQ ID NO: 28 - protein, 118 aa, Mus musculus
DVQLQESGPALVKPSQTVSLTCTVTGYSITNGNHWWNWIRQVSGSKLEWIGYITSSGRTDSNPSLKSRISITRDTSKNQLFLQLNSVTTEDIVTYYCTREGGWLPPVWGTGTTVTVSS

SEQ ID NO: 29 - protein, 118 aa, Mus musculus
QIQLVQSGPDLKKPGETVKISCKASGYTFTTYGMNWVKQAPGKGLKWMGWINTYSGVPKYTDDFKGRFAFSLETSASTAYLQINNLKNEDTATYFCARYDYDVGFAYWGQGTLVTVSA

SEQ ID NO: 30 - protein, 118 aa, Mus musculus
DIQLQESGPALVKPSQTVSLTCTVTGYSITNGNHWWNWIRQVSGSKLEWIGYISSSGRTDSNPSLKSRISITRDTSKNKLFLQLNSVTTEDIATYYCAREGGWLPPVWGTGTTVTVSS

SEQ ID NO: 31 - protein, 118 aa, Mus musculus
QIQLVQSGPELKKPGETVKISCKASGYTFTTYGMNWVKQAPGKGLKWMGWINTFSRVPTYADDFKGRFAFSLETSASTAYLQINNLTNEDTATYFCARYDYDVGFAYWGQGTLVTVSA

SEQ ID NO: 32 - protein, 118 aa, Mus musculus
DVQLQESGPALVKPSQTVSLTCTVTGYSITNGNHWWNWIRQVSGSKLEWIGYITSSGRTDSNPSLKSRISITRDTSKNQLFLQLNSVTTEDIATYYCSREGGWLPPVWGTGTTVTVSS

SEQ ID NO: 33 - protein, 119 aa, Mus musculus
DVQLQESGPGLVKPSQTVFLTCTVTGISITTGNYKWSWIRQFPGNKLEWIGYIYYSGTITYNPSLTSRTTITRDTPKNQFFLEMNSLTAEDTATYYCARETVLRVFDYWGQGTTLTVSS

SEQ ID NO: 34 - protein, 118 aa, Mus musculus
DVQLQASGPALVKPYQTVSLTCTVTGYSITNGHHWWNWIRQVSGSKLEWIGYISSSGSTDNNPSLKSRISITRDTSKNQLFLQLNSVTTEDIATYYCAREGGWLPPVWGTGTTVTVSS

SEQ ID NO: 35 - protein, 118 aa, Mus musculus
DVQLQESGPALVKPSQTVSLTCTVTGYSITNGNHWWNWIRQVSGSKLEWIGYITSSGRTDSNPSLRSRISITRDTSKNKLFLQLNSVTNEEKATYYCAREGGWLPPVWGTGTTVTVSS

SEQ ID NO: 36 - protein, 118 aa, Mus musculus
DVQLQESGPALVKPSQTVSLTCTVTGYSITNGNHWWNWVRQVSGSKLEWIGYISSSGRIDSNPSLESRISITRDTSKNQLFLQLNSVTTEDIATYYCAREGGWLPPVWGTGTTVTVSS

SEQ ID NO: 37 - protein, 118 aa, Mus musculus
DVQLQESGPALVKPSQTVSLTCTVTGYSITNGNHWWNWIRQVSGGKLEWIGYIRSSGSTDRNPSLKSRISITRDTSKNQLFLQLNSVTNEDIATYYCAREGGWLPPVWGTGTTVTVSS

SEQ ID NO: 38 - protein, 118 aa, Mus musculus
DVQLQESGPALVKPSQTVSLTCTVTGYSITNGNHWWNWVRQVSGRKLEWIGYITSSGRTDSNPSLKSRISITRDTSKNHLFLQLNSVTTEDIATYYCAREGGWLPPVWGTGTTVTVSS

SEQ ID NO: 39 - protein, 118 aa, Mus musculus
QVQLQQSDAELVKPGASVKISCKVSGYTFTDHTIHWMKQRPEQGLEWIGYIYPRDGSTKYNEKFKGKATLTADKSSSTAYMQLNSLTSEDSAVYFCARRVVASGMDYWGQGTSVTVSS

SEQ ID NO: 40 - protein, 121 aa, Mus musculus
QVQLQQSGAELVRPGTSVKVSCKASGYAFTNYLIEWIKQRPGQGLEWIGVINPGSGGSNCNEKFKAKTTLTADKSSSTAYMQLSSLTSEDSAVYFCARTGVYGNFLIFDYWGQGTTLTVSS

SEQ ID NO: 41 - protein, 118 aa, Mus musculus
DVQLQASGPALVKPSQTVSLTCTVTGYSITNGNHWWNWIRQVSGSKLEWIGYISSSGRTDSNPSLKSRISFTRDTSKNQLFLLLNSVTTEDMATYYCAREGGWLPPVWGTGTTVTVSS

SEQ ID NO: 42 - protein, 118 aa, Mus musculus
DVQLQESGPALVKPSQTVSLTCTVTGYSITNGNHWWNWIRQVSGSKLEWIGYITSSGRTDSNPSLRSRISITRDISKNKLFLQLNSVTNEEIATYYCAREGGWLPPVWGTGTTVTVSS

SEQ ID NO: 43 - protein, 118 aa, Mus musculus
DVQLQESGPALVKPSQTVSLTCTVTGYSITNGNHWWNWIRQVSGSKLEWIGYISSSGRTDSNPSLKSRISITRDTSKNQLFLQLNSVTTEDVATYYCAREGGWLPPVWGTGTTVTVSS

SEQ ID NO: 44 - protein, 118 aa, Mus musculus
DVQLQESGPALVKPSQTVSLTCSVTGYSITNGNHWWNWIRQVSGSKLEWIGYITSSGRTDSNPSLRSRISITRDTSKNKLFLQLNSVTNEDIATYYCAREGGWLPPVWGTGTTVTVSS

SEQ ID NO: 45 - protein, 118 aa, Mus musculus
DVQLQASGPALVKPSQTVSLTCTVTGYSITNGNHWWNWIRQVSGSKLEWIGYIRSSGSTDSNPSLKSRISITRDTSKNKLFLQLKSVTTEDIATYYCAREGGWLPPVWGTGTTVTVSS

SEQ ID NO: 46 - protein, 118 aa, Mus musculus
DVQLQESGPALVKPSQTVSLTCTVTGYSITSGNHWWNWVRQVSGSKLEWIGYISSSGRIDSNPSLESRISITRDTSKNQLFLQLNSVTTEDIATYYCAREGGWLPPVWGTGTTVTVSS

SEQ ID NO: 47 - protein, 119 aa, Mus musculus
DVQLQESGPGLVKPSQTVFLTCTVTGISITTGNYKWSWIRQFPGNKLEWIGYIYYSGTITYNPSLASRTTITRDTPKNQFFLELSSLTAEDTASYYCARETVLRVFDYWGQGTTLTVSS

SEQ ID NO: 48 - protein, 112 aa, Mus musculus
QVQLQQSGPELVKPGASVKISCKASGYTFTDYYINWVKQRPGQGLEWIGWIFPGSGSTYYNEKFKGKATLTVDKSSSTTYMLLSSLTSEDSAVYFCARFTVWGTGTTVTVSS

SEQ ID NO: 49 - protein, 119 aa, Mus musculus
QVQLKQSGAELVKPGASVKLSCKASGYTFTDYYINWVKQRPGQGLEWIARIYPGSGNTYYNEKFKGKATLTAEKSSSTAYMQLSSLTSEDSAVYFCARVTYYGGYFDYWGQGTTLTVSS

SEQ ID NO: 50 - protein, 118 aa, Mus musculus
DVQLQESGPALVKPSQTVSLTCTVTGYSITNGNHWWNWIRQVSGSKLEWIGYISSSGRTDSNPSLKSRISITRDTSKNQLFLQLNSVTTENIATYYCAREGGWLPPVWGTGTTVTVSS

SEQ ID NO: 51 - protein, 118 aa, Mus musculus
DVQLQASGPALVKPYQTVSLTCTVTGYSITNGNHWWNWIRQVSGSKLEWIGYIRSSGSTDSNPSLKSRISITRDTSKNQLFLQLNSVTTEDIATYYCAREGGWLPPVWGTGTTVTVSS

SEQ ID NO: 52 - protein, 120 aa, Mus musculus
QVQLQQSGAELMKPGASVKLSCKAIGYILSGYWIEWVKQRPGHGLEWIGEIFPGSGSTNYNEKFKGKATFTADTSSNTAYIQLSSLTTEDSAIYYCARIRITTVPYFDFWGQGTTLTVSS

SEQ ID NO: 53 - protein, 116 aa, Mus musculus
QVQLQQPGTELVKPGASVKLSCKTSGYTFTSYWMHWVKQRPGQGLEWIGNINPSNGVTNYNEKFKSKATLTVDKSSSTAYMQLSSLTSEDSAVYYCARDYDYFDYWGQGTTLTVSS

SEQ ID NO: 54 - protein, 116 aa, Mus musculus
DVQLQESGPGLVKPSQSLSLTCSVTGYSITSAYYWNWIRQFPGNKLEWMGYISYDGTNNYNPSLKDRISITRDASKNQFFLRLNSVTTEDTATYYCGRGRPFVPYWGQGTLVTVSA

SEQ ID NO: 55 - protein, 118 aa, Mus musculus
DVQLQESGPALVKPSQTVSLTCTVTGYSITNGNHWWNWIRQVSGSKLEWIGYITSSGRTDSNPSLKSRISITRDTSKNKLFLQLNSVTNEDIATYYCAREGGWLPPVWGTGTTVTVSS

SEQ ID NO: 56 - protein, 117 aa, Mus musculus
QVQLQQSDAELVKPGASVKISCKVSGYTFTDHTIHWMIQRPEQGLEWIGYIYPRDGSTKYNEKFKGKATLTADKSSSTAYMQLNSLTSEDSAVYFCARRALPYFDCWGQGTTLTVSS

SEQ ID NO: 57 - protein, 118 aa, Mus musculus
DVQLQASGPALVKPSQTVSLTCTVTGYSITNGNHWWNWIRQISGSKLEWIGYITSSGRTDSNPSLKSRISITRDTSKNQLFLQLNSVTTEDIATYYCAREGGWLPPVWGTGTTVTVSS

SEQ ID NO: 58 - protein, 118 aa, Mus musculus
DVQLQESGPALVKPSQTVSLTCTVTGYSITNGNHWWNWIRQVSGNKLEWIGYISSSGRTDSNPSLKSRISITRDTSKNQLFLQLNSVTTEDIATYYCAREGGWLPPVWGTGTTVTVSS

SEQ ID NO: 59 - protein, 121 aa, Mus musculus
QVQLQQSGAELVRPGTSVKVSCKASGYAFTNYLIEWVKQRPGQGLEWIGVINPGSGGSNYNEKFKGKTTLTADKSSSTAYMQLSSLTSEDSAVYFCARTGVYGNFLIFDYWGQGTTLTVSS

SEQ ID NO: 60 - protein, 118 aa, Mus musculus
DVQLQESGPALVKPSQTVSLTCTVTGYSITNGNHWWNWIRQVSGNKLEWIGYITSSGRTDSNPSLKSRISITRDTSKNQLFLQLNSVTTEDIATYYCAREGGWLPPVWGTGTTVTVSS

SEQ ID NO: 61 - protein, 121 aa, Mus musculus
QVQLQQSGAELVRPGTSVKVSCKASGYAFTNYLIEWVKQRPGQGLEWIGVINPGSGGSNYNEKFKGKTTLTADKSSSTAYMQLSSLTSEDSAVYFCARTGVYANFLIFDYWGQGTTLTVSS

SEQ ID NO: 62 - protein, 118 aa, Mus musculus
DVQLQESGPALVKPSQTVSLTCTVTGYSITNGNHWWNWVRQVSGRKLEWIGYITSSGRTDSNPSLKSRISITRDTSKNQLFLQLNSVTTEDIATYYCAREGGWLPPVWGTGTTVTVSS

SEQ ID NO: 63 - protein, 118 aa, Mus musculus
DVQLQVSGPALVMPSQTVSLTCTVTGYSITNGNHWWNWIRQVSGSKLEWIGYITSSGRTDSNPSLKSRISITRDTSKNQLFLQLNSVTTEDIATYFCAREGGWLPPVWGTGTTVTVSS

SEQ ID NO: 64 - protein, 118 aa, Mus musculus
DVQLQESGPALVKPSQTVSLTCTVTGYSITNGNHWWNWIRQVSGSKLEWIGYITSSGRTDSNPSLKSRISITRDTSKNQLFLQLNSVTTEYIATYYCAREGGWLPPVWGTGTTVTVSS

SEQ ID NO: 65 - protein, 121 aa, Mus musculus
QVQLQQPGTELVKPGASVKLSCKASGYTFTSYWMHWVKQRPGQGLEWIGNINPSNGGTNYNEKFKTKATLTVDRSSSTAYMQLSRLTSEDSAVYYCARRTTVLAGPYFDYWGQGTILTVSS

SEQ ID NO: 66 - protein, 118 aa, Mus musculus
DVQLQASGPALVKPSQTVSLTCTVTGYSITNGNHWWNWIRQVSGSKLEWIGYITSSGRTDSNPSLKSRISITRDTSKNQLFLQLNSVTTEDIATYYCAREGGWLPPVWGTGTTVTVSS

SEQ ID NO: 67 - protein, 118 aa, Mus musculus
DVQLQASGPALVKPSQTVSLTCTVTGYSITNGNHWWNWIRQVSGSKLEWIGYITSSGRTDSNPSLKSRISITRDTSKNQLFLQLNSVITEDIATYYCAREGGWLPPVWGTGTTVTVSS

SEQ ID NO: 68 - protein, 118 aa, Mus musculus
DVQLQESGPALVKPSQTVSLTCTVTGYSITNGNHWWNWIRQVSGGKLEWIGYIRSSGSTDSNPSLKSRISITRDISKNELFLQLNSVTTEDIATYFCTREGGWLPPVWGTGTTVTVSS

SEQ ID NO: 69 - protein, 118 aa, Mus musculus
DVQLQASGPALVKPYQTVSLTCTVTGYSITNGNHWWNWIRQVSGSKLEWIGFIRSSGSTDSNPSLKSRISITRDTSKNQLFLQLNSVTTEDIATYYCAREGGRLPPVWGTGTTVTVSS

SEQ ID NO: 70 - protein, 118 aa, Mus musculus
DVQLQESGPALVKPSQTVSLTCTVTGYSISNGNHWWNWIRQVSGSKLEWIGYITSSGRTDSNPSLKSRISITRDTSKNQLFLQLNSVTTEDIATYYCAREGGWLPPVWGTGTTVTVSS

SEQ ID NO: 71 - protein, 118 aa, Mus musculus
DVQLQESGPALVKPSQTVSLTCTVTGYSITNGNHWWNWVRQVSGSKLEWIGYISSSGRTDNNPSLKSRISITRDTSKNQLFLQLNSVTTEDIATYYCAREGGWLPPVWGTGTSVTVSS

SEQ ID NO: 72 - protein, 118 aa, Mus musculus
DVQLQASGPALVKPSQTVSLTCTVTGYSITNGNHWWNWIRQVSGSKLEWIGYITSSGRTDSNPSLKSRISITRDTSKNQFFLQLNSVITEDIATYYCAREGGWLPPVWGTGTTVTVSS

SEQ ID NO: 73 - protein, 118 aa, Mus musculus
DVQLQESGPALVKPSQTVSLTCTVTGYSITNGNHWWNWIRQVSGSKLEWIGYISSSGRIDSNPSLKSRISITRDTSKNQLFLQLNSVTTEDIGTYYCAREGGWLPPVWGTGTTVTVSS

SEQ ID NO: 74 - protein, 118 aa, Mus musculus
DVQLQESGPALVKPSQTVSLTCTVTGYSITNGNHWWNWIRQVSGSKLEWIGYITSSGRTDSNPSLRSRISITRDTSKNQLLLQLNSVTTEDIATYYCAREGGWLPPVWGTGTTVTVSS

SEQ ID NO: 75 - protein, 119 aa, Mus musculus
EVMLVESGGDLVKPGGSLKLSCAASGFTFSRYIMSWVRQTPEKRLEWVATISGGGGNTYYPDSVKGRFTISRDNAKNTLYLQVSSLRSEDTALYYCARWLPSYYAMDYWGQGTSVTVSS

SEQ ID NO: 76 - protein, 118 aa, Mus musculus
DVQLQASGPALVKPSQTVSLTCTVTGYSITNGNHWWNWIRQVSGSKLEWIGYITSSGRTDSNPSLKSRISITRDTFKNQFFLQLNSVITEDIATYYCAREGGWLPPVWGTGTTVTVSS

SEQ ID NO: 77 - protein, 118 aa, Mus musculus
DVQLQVSGPALVMPSQTVSLTCTVTGYSITNGNHWWNWIRQVSGSKLEWIGYITSSGRTDSNPSLKSRISITRDTSKNQLFLQLNSVTTEDIATYYCAREGGWLPPVWGTGTTVTVSS

SEQ ID NO: 78 - protein, 118 aa, Mus musculus
DVQLQASGPALVKPSQTVSLTCTVTGYSITNGNHWWNWIRQVSGSKLEWIGYIRSSGSTDSNPSLKSRISITRDTSKNQLFLQLNSVTTEDIATYYCAREGGWLPPVWGTGTTVTVSS

SEQ ID NO: 79 - protein, 119 aa, Mus musculus
EVMLVESGGGLVKPGGSLKLSCAASGFTFSSYTMSWVRQTPEKRLEWVATISGGGGNTYYPDSVKGRFTISRDNAKNTLYLQMSSLRSEDTALYYCARWLLTYYAMDYWGQGTSVTVSS

SEQ ID NO: 80 - protein, 118 aa, Mus musculus
QVQLQQSGPELVKPGASVRISCKASGYTFTDCYINWVKLRPGQGLEWIGWIFPGSDFTYYNEKFKGKATLTVDTSSSTAYMLFSSLTSEDSAVYFCARYGLGHYFDYWGQGTTLTVSS

SEQ ID NO: 81 - protein, 118 aa, Mus musculus
QIQLQQSGPELVKSGASVKISCKASGYTFTAYCINWVKQRPGQGLEWIGWIFPGSGSTNYNEKFKGKATYTVDKSSSTAYMLLSSLTSEDSAVYFCARYGLGHYFDYWGQGTTLTVSS

SEQ ID NO: 82 - protein, 118 aa, Mus musculus
DVQLQESGPALVKPSQTVSLTCTVTGYSITNGNHWWNWIRQVSGSKLEWIGYITSSGRTDSNPSLKSRISITRDTSKNQLFLQLNSVTTEDIATYFCSREGGWFPPVWGTGTTVTVSS

SEQ ID NO: 83 - protein, 118 aa, Mus musculus
DVQLQESGPALVKPSQTVSLTCTVTGYSITNGNHWWNWIRQVSGGKLEWIGYIRSSGSTDYNPSLKSRISITRDISKNELFLQLNSVTTEDIATYYCTREGGWLPPVWGTGTTVTVSS

SEQ ID NO: 84 - protein, 118 aa, Mus musculus
DVQLQESGPALVKPSQTVSLTCTVTGYSITNGNHWWNWIRQVSGSKLEWIGYITSSGRTDSNPSLKSRISITRDTSKNQLFLQLNSVTTEDIATYYCTREGGWLPPVWGTGTTVTVSS

SEQ ID NO: 85 - protein, 121 aa, Mus musculus
QVQLQQPGTELVKPGTSVKLSCKASGYTFTSYWMHWVKQRPGQGLEWIGNINPSNGGTNYNEKFMRKATLTVDKSSSTAYMQLSSLTSEDSAVYYCARRTTVLAGPYFDYWGQGTTLTVSS

SEQ ID NO: 86 - protein, 124 aa, Mus musculus
EVQLVESGGDLVKPGGSLKLSCAASGFTFSSYGMSWVRQTPDKRLEWVATISSGGSYTYYPDSVKGRFTISRDNAKNTLYLQMSSLQSEDTAMYYCARHHYYYGSSYIFYFDVWGTGTTVTVSS

SEQ ID NO: 87 - protein, 119 aa, Mus musculus
EVMMVESGGGLVKPGGSLKLSCAASGFTFSSYTMSWVRQTPEKRLEWVATISGRGGNTYYPDSVKGRFTISRDNAKSTLYLQMSSLRSEDTAMYYCARWLLTYYAMDYWGQGTSVTVSS

SEQ ID NO: 88 - protein, 119 aa, Mus musculus
EVMMVESGGGLVRPGGSLKLSCAASGFTFSSYTMSWIRQTPEKRLEWVATISGRGGNTYYPDSVKGRITISRDNAKNTLYLQMSSLRSEDTAMYYCVRWLLTYYAMDYWGHGTSVTVSS

SEQ ID NO: 89 - protein, 119 aa, Mus musculus
EVMLVESGGGLVKPGGSLKLSCAASGFTFSSYTMSWVRQTPEKRLEWAATISGGGGNTYYPDSVKGRFTISRDNAKNTLYLQMSSLRSEDTALYYCARWLPTYYAMDYWGQGTSVTVSS

SEQ ID NO: 90 - protein, 118 aa, Mus musculus
QIQLVQSGPELKKPGETVKISCKASGYSFTTYGMNWVKQAPGKGLKWMGWINTYSGVPTYDDDFKGRFAFSLETSASTAYLQINNLKNEDTATYFCARYDYDVGFAYWGPGTLVTVSA

SEQ ID NO: 91 - protein, 118 aa, Mus musculus
DVQLQASGPALVKPSQTVSLTCTVTGYSITHGNHWWNWIRQVSGSKLEWIGYISSSGRIDTNPSLKSPISITRDTSKNKFFLQLNSVTTEDIATYYCAREGGWLPPVWGTGTTVTVSS

SEQ ID NO: 92 - protein, 118 aa, Mus musculus
DVQLQESGPALVKPSQTVSLTCTVTGYSITNGNHWWNWIRQVSGSKLEWIGYITSSGRTDSNPSLQSRISITRDTSKNQLFLQLNSVTTEDIATYYCTREGGWLPPVWGTGTTVTVSS

SEQ ID NO: 93 - protein, 118 aa, Mus musculus
DVQLQESGPALVKPSQTVSLTCTVTGYSITNGNHWWNWIRQVSGRKLEWIGYITSSGRIDSNPSLKSRISITRDTSKNQLFLQLNSVTSEDLGTYYCAREGGWLPPVWGTGTTVTVSS

SEQ ID NO: 94 - protein, 118 aa, Mus musculus
DVQLQVSGPALVKPSQTVSLTCTVTGYSITNGNHWWNWIRQVSGSKLEWIGYISSSGRTDSNPSLQSRISITRDTSKNQLFLQLNSVTTEDIGTYYCAREGGWLPPVWGTGTTVTVSS

SEQ ID NO: 95 - protein, 118 aa, Mus musculus
DVQLQESGPALVKPSQTVSLTCTVTGYSITNGNHWWNWIRQVSGSKLEWIGYITSSGRTDSNPSLRSRISITRDISKNKLFLQMNSVTNEEIATYYCAREGGWLPPVWGTGTTVTVSS

SEQ ID NO: 96 - protein, 121 aa, Mus musculus
QVQLQQSGAELVRPGTSVKVSCKASGYAFTNYLIEWVKQRPGQGLEWIGVINPGSGGSNYSEKFKGKTTLTADRSSSTAYMQLSSLTSEDSAVYFCARTGVYGNFLIFDYWGQGTTLTVSS

SEQ ID NO: 97 - protein, 118 aa, Mus musculus
DVQLQESGPALVKPSQTVSLTCTVTGYSITNGNHWWNWIRQVSGGKLEWIGYITSSGRTDSNPSLKSRISITRDTSKNHLFLQLNSVNTDDVGTYYCAREGGWLPPVWGTGTTVTVSS

SEQ ID NO: 98 - protein, 118 aa, Mus musculus
DVQLQESGPALVKPSQTVSLTCTVTGYSITNGNHWWNWIRQVSGSKLEWIGYITSSGRTDSNPSLKSRISITRDTSRNQLFLQLNSVITEDVATYFCAREGGWLPPVWGTGTTVTVSS

SEQ ID NO: 99 - protein, 118 aa, Mus musculus
DVQLQESGPALVKPSQTVSLTCTVTGYSITNGNHWWNWIRQVSGSKLEWIGYITSSGRTDSNPSLKSRISITRDTSKNQLFLQLDSVTTEEIATYYCAREGGWLPPVWGTGTTVTVSS

SEQ ID NO: 100 - protein, 118 aa, Mus musculus
DVQLQASGPALVKPSQTVSLTCTVTGYSITNGNHWWNWIRQVSGGKLEWIGYIRSSGSTDTNPSLKSRISITRDISKNELFLQLNSVTTEDIATYYCTREGGWLPPVWGTGTTVTVSS

SEQ ID NO: 101 - protein, 118 aa, Mus musculus
DVQLQESGPALVKPSQTVSLTCTVTGYSITNGNHWWNWIRQVSGSKLEWIGYIRSSGRTDSNPSLKSRISITRDTSKNQLFLQLNSVTTEDIATYYCTREGGWLPPVWGTGTTVTVSS

SEQ ID NO: 102 - protein, 118 aa, Mus musculus
DVQLQESGPALVKPSQTVSLTCTVTGYSITNGNHWWNWIRQVSGRKLEWIGYITSSGRTDSNPSLRSRISITRDTSKNQLFLQLNSVTTENIATYYCAREGGWLPPVWGTGTTVTVSS

SEQ ID NO: 103 - protein, 118 aa, Mus musculus
DVQLQESGPALVKPSQTVSLTCTVTGYSITNGNHWWNWVRQVSGSKLEWIGYITSSGRIDNNPSLKSRISITRDTSKNQLFLQLNSVTTEDIATYYCAREGGWLPPVWGTGTTVTVSS

SEQ ID NO: 104 - protein, 118 aa, Mus musculus
DVQLQESGPALVKPSQTVSLTCTVTGYSITNGNHWWNWIRQVSGGKLEWIGYIRSSGSTDINPSLKSRISITRDISKNEFFLQLNSVTTEDIATYYCSREGGWLPPVWGTGTTVTVSS

SEQ ID NO: 105 - protein, 118 aa, Mus musculus
DVQLQESGPALVKPSQTVSLTCTVTGYSITNGNHWWNWIRQVSGSKLEWIGYIRSSGRTDSNPSLESRISITRDTSKNQIFLQLNSVTTEDIATYYCTREGGRLPPVWGTGTTVTVSS

SEQ ID NO: 106 - protein, 118 aa, Mus musculus
DVQLQESGPALVKPSQTVSLTCTVTGYSITNGNHWWNWIRQVSGSKLEWIGYITSSGRTDSNPSLKSRISITRDTSKNQLFLQLNSVTTEDIGTYYCAREGGWFPPVWGTGTTVTVSS

SEQ ID NO: 107 - protein, 118 aa, Mus musculus
DVQLQVSGPALVKPSQTVSLTCTVTGYSIINGNHWWNWIRQVSGSKLEWIGYITSSGRTDSNPSLKSRISITRDTSKNQLFLQLNSVTTEDIATYYCAREGGWLPPVWGTGSTVTVSS

SEQ ID NO: 108 - protein, 118 aa, Mus musculus
DVQLQESGPALVKPSQTVSLTCTVTGYSITTGNHWWNWIRQVSGGKLEWIGYIRSSGSTDSNPSLESRISITRDISKNELFLQLNSVTTADMGTYYCTREGGLFPPVWGTGTTVTVSS

SEQ ID NO: 109 - protein, 118 aa, Mus musculus
DVQLQASGPALVKPSQTVSLTCTVTGYSITNGNHWWNWIRQVSGSKLEWIGYITSNGRTDSNPSLKSRISITRDTSKNKLFLQLNSVTHEDIATYYCAREGGWLPPVWGTGTTVTVSS

SEQ ID NO: 110 - protein, 119 aa, Mus musculus
EVMLVESGGGLVKPGGSLKLSCAASGFTFSRYIMSWVRQTPEKRLEWVATITGGGGNTYYPDSVKGRFTISRDNARNTLYLQMSSLSSEDTALFYCARWLPTYYAMDYWGQGTSVTVSS

SEQ ID NO: 111 - protein, 118 aa, Mus musculus
DVQLQESGPALVKPSQTVSLTCTVTGYSITNGNHWWNWIRQVSGSKLEWIGYITSSGRTDSNPSLRSRISITRDTSKNQLFLQLNSVTTEEIATYYCAREGGWLPPVWGTGTTVTVSS

SEQ ID NO: 112 - protein, 118 aa, Mus musculus
QVQLQQSGPELVRPGASVTISCKASGYTFTDYYINWVKQRPGQGLEWIGWIFPGSDNTYYNAKFKGKATLTVDISSSTAYMLLSSLTSEDSAVYFCARYGLGHYFDYWGQGTTLTVSS

SEQ ID NO: 113 - protein, 118 aa, Mus musculus
DIQLQESGPALVKPSQTVSLTCTVTGYSITNGNHWWNWIRQVSGSKLEWIGYITSSGRTDSNPSLKSRISITRDTSKNQLFLQLNSVITEDIATYYCAREGGWLPPVWGTGTTVTVSS

SEQ ID NO: 114 - protein, 119 aa, Mus musculus
QVQLQQPGAELVKPGASVKMSCKASGYTFTSYWITWVKQRPGQGLEWIGDFYPGGGSTNYNEKFKSKATLTVDTSSNTAYMQLSSLTSEDSAVYYCARSYSNYVRFAYWGQGTLVTVSA

SEQ ID NO: 115 - protein, 118 aa, Mus musculus
QVQLQQSGPELVKPGASVKISCKASGHTFTDYYINWVKQRPGQGLEWIGWIFPGSGNTYFNEKFKGKATLTVDKSSSTVYMLLSSLTSEDSAVYFCAGYGLGHYFDNWGQGTTLTVSS

SEQ ID NO: 116 - protein, 118 aa, Mus musculus
DVQLQESGPALVKPSQTVSLTCTVTGYSITNGNHWWNWIRQVSGSKLEWIGYIRSSGSTDSNPSLKSRISITRDTSKNQLFLQLNSVTTEDIATYYCTREGGWLPPVWGTGTTVTVSS

SEQ ID NO: 117 - protein, 118 aa, Mus musculus
DVHLQESGPALVKPSQTVSLTCTVTGYSITNGNHWWNWIRQVSGSKLEWIGYITSSGRTDSNPSLKSRISITRDTSKNQLFLQLNSMITEDIATYYCAREGGWLPPVWGTGTTVTVSS

SEQ ID NO: 118 - protein, 118 aa, Mus musculus
DVQLQESGPALVKPSQTVSLTCTVTGYSITNGKHWWNWIRQVSGGKLEWIGYIRSSGSTDFNPSLKSRISITRDISKNELFLQLNSVTTEDIATYYCTREGGWLPPVWGTGTTVTVSS

SEQ ID NO: 119 - protein, 118 aa, Mus musculus
DVQLQESGPALVKPSQTVSLTCTVTGYSITNGNHWWNWIRQVSGSKLEWIGYITSSGRTDSNPSLRSRFSITRDTSKNKLFLQLNSVTNEDIATYYCAREGGWLPPVWGTGTTVTVSS

SEQ ID NO: 120 - protein, 118 aa, Mus musculus
DIQLQESGPALVKPSQTVSLTCTVTGYSITNGNHWWNWIRQVSGSKLEWIGYISSSGRTDRNPSLKSRISITRDTSKNQVFLQLNSVTTEDIATYYCAREGGWLPPVWGTGTTVTVSS

SEQ ID NO: 121 - protein, 118 aa, Mus musculus
DVQLQVSGPALVKPSQTVSLTCTVTGYSITNGNHWWNWIRQVSGSKLEWIGYISSSGRTDSNPSLKSRISITRDTSKNQLFLQLNSVTTEDTVTYYCAREGGWLPPVWGTGTTVTVSS

SEQ ID NO: 122 - protein, 118 aa, Mus musculus
DVQLQESGPALVKPSQTVSLTCTVTGYSITNGNHWWNWIRQVSGSKLEWIGYITSSGRTDSNPSLSSRVSITRDTSKNQLFLQLNSVTTEDIATYYCTREGGWLPPVWGPGTTVTVSS

SEQ ID NO: 123 - protein, 118 aa, Mus musculus
DVQLQESGPALVKPSQTVSLTCTVTGYSITNGNHWWNWIRQVSGGKLEWIGYIRSSGSTDINPSLKSRISITRDISKNELFLQLNSVTTEDIATYYCTREGGWLPPVWGTGTTVTVSS

SEQ ID NO: 124 - protein, 118 aa, Mus musculus
DVQLQESGPALVKPSQTVSLTCTVTGYSITNGNHWWNWIRQVSGTKLEWIGYIRSSGGTDSNPSLKSRISITRDTSKNQLFLQLNSVTTEDIGTYYCSREGGWLPPVWGTGTTVTVSS

SEQ ID NO: 125 - protein, 118 aa, Mus musculus
DVQLQESGPALVKPSQTVSLTCTVTGYSITNGNHWWNWIRQVSGGKLEWIGYIRSSGSTDSNPSLKSRISITRDISKNEIFLQLNSVNDEDIATYYCTREGGWLPPVWGTGTTVTVSS

SEQ ID NO: 126 - protein, 118 aa, Mus musculus
DVQLQESGPALVKPSQTVSLTCTVTGYSITNGNHWWNWIRQVSGTNLEWIGYITSSGRTDSNPSLKSRISITRDTSKNQLFLQLNSVTTEDIATYYCSREGGWLPPVWGTGTTVTVSS

SEQ ID NO: 127 - protein, 118 aa, Mus musculus
DVQLQESGPALVKPSQTVSLTCTVTGYSITNGHHWWNWIRQVSGSKLEWIGYITSSGRTDSNPSLKSRISITRDTSKNQLFLQLNSVTTEDIATYYCAREGGWLPPVWGTGTTVTVSS

SEQ ID NO: 128 - protein, 118 aa, Mus musculus
DVQLQASGPALVKPSQTVSLTCTVTDYSITNGNHWWNWVRQVSGSKLEWIGYISSSGRIDSNPSLKSRISITRDTSKNQLFLQLTSVTTEDIATYYCAREGGLLPPVWGTGTTVTVSS

SEQ ID NO: 129 - protein, 118 aa, Mus musculus
DVQLQESGPALVKPSQTVSLTCTVTGYSITNGNHWWNWIRQVAGSKLEWIGYISSSGRIDSNPSLKSRISITRDTSKNQLFLQLNSVTTEDIGTYYCAREGGWLPPVWGTGTTVTVSS

SEQ ID NO: 130 - protein, 118 aa, Mus musculus
DVQLQASGPALVKPYQTVSLTCTVTGYSITNGNHWWNWIRQVSGSKLEWIGYITSSGRTDSNPSLRSRISITRDTSKNQLFLQLNSVTTEDIATYYCTREGGWFPPVWGTGTTVTVSS

SEQ ID NO: 131 - protein, 118 aa, Mus musculus
DVQLQESGPALVKPSQTVSLTCTVTGYSITNGNHWWNWIRQVSGSKLEWIGYITSSGRTDSNPSLKSRISITRDTSKNQLFLQLNSVTTDDVATYYCAREGGWLPPVWGTGTTVTVSS

SEQ ID NO: 132 - protein, 118 aa, Mus musculus
DVQLQESGPALVKPSQTVSLTCTVTGYSITNGNHWWNWIRQVSGGKLEWIGYIRSSGSTDSNPSLKSRISITRDISKNELFLQLNSVTIEDTATYYCTREGGWLPPVWGTGTTVTVSS

SEQ ID NO: 133 - protein, 118 aa, Mus musculus
DVQLQESGPALVKPSQTVSLTCTVTGYSITNGNHWWNWIRQVSGTKLEWIGYIRSSGSTDSNPSLKSRISITRDTSKNQLFLQLNSVTTEDIATYYCAREGGWLPPVWGTGTTVTVSS

SEQ ID NO: 134 - protein, 118 aa, Mus musculus
QIELVQSGPELKKPGETVKISCKASGYTFTTYGMNWVKQAPGKGLKWMGWINTYSGVPTYADDFKGRFAFSLETSASTAYLQINNLKNEDTATYFCARYDYDVGFAYWGQGTLVTVSA

SEQ ID NO: 135 - protein, 118 aa, Mus musculus
DVQLQESGPALVKPSQTVSLTCTVTGYSITNGNHWWNWIRQVSGGKLEWIGYIRSSGSTDSNPSLKSRISITRDIYKNELFLQLNSVNTEDTATYYCTREGGWLPPVWGTGTTVTVSS

SEQ ID NO: 136 - protein, 118 aa, Mus musculus
DVQLQESGPALVKPSQTVSLTCTVTGYSITNGNHWWNWIRQVSGSKLEWIGYISSSGRTDSNPSLKSRISITRDTSKNQLFLQLNSVTTEDIATYYCAREGGWLPPVWGTGTTVTVSS

SEQ ID NO: 137 - protein, 118 aa, Mus musculus
DVQLQESGPALVKPSQTVSLTCTVTGYSITNGNHWWNWIRQVSGSKLEWIGYISSSGRTDSNPSLRSRISITRDTSKNKLFLQLNSVTNEDIATYYCAREGGWLPPVWGTGTTVTVSS

SEQ ID NO: 138 - protein, 118 aa, Mus musculus
DVQLQASGPALVKPYQTVSLTCTVTGYSITNGNHWWNWIRQVSGSKLEWIGYISSSGRTDSNPSLRSRISITRDTSKNQLFLQLNSVTTEDIATYYCAREGGWLPPVWGTGTTVTVSS

SEQ ID NO: 139 - protein, 119 aa, Mus musculus
EVQLQQSGPELVKPGASMKISCKASGYSFTGYILNWVKQSHGKNLEWIGLIVPYTGGTSYNQDFQGKATLTVDRSSSTAYLELLSLTSEDSAVYYCARQLRGYFAMDYWGQGTSVTVSS

SEQ ID NO: 140 - protein, 122 aa, Mus musculus
QVQLKESGPGLVAPSQSLSITCTVSGFSLTRHGIHWVRQPPGKGLEWLGVIWPGGNTKYNSALMSRLSISKDNSKSQVFLKMNSLQTDDTAMYYCARSGGYGNFAPYYFDQWGQGTTLTVSS

SEQ ID NO: 141 - protein, 114 aa, Mus musculus
QIQLVQSGPELKKPGETVKISCKASGYTFTNYGMNWVKKAPGKGLKWMGWINTYTGESTYADDFKGRFAFSSETSASTVYLQINNLKNEDTATYFCARDSFAYWGQGTLVTVSA

SEQ ID NO: 142 - protein, 118 aa, Mus musculus
EVQLQQSGPELEKPGSSVKISCKASGYSFTDYNMHWVKQSNGKSLEWIGDIDVYYSGTSYNQKFKGKATLTVDKSSSTAYMQLKSLTSEDSAVYFCARSLLRWYFDVWGAGTTVTVSS

SEQ ID NO: 143 - protein, 119 aa, Mus musculus
QITLKESGPGIVQPSQPFRLTCTFSGFSLSTSGIGVTWIRQPSGRGLEWLATIWWDDDNRYNPSLKSRLTVSKDTSNNQAFLKIITVETADTAIYYCAQSGGITLMDYWGQGTSVTVSS

SEQ ID NO: 144 - protein, 117 aa, Mus musculus
EVQLQQSGPELVKPGASMKISCKASGYSFTGYTMNWVKQSHGKNLEWIGLIVPSNGGTSYNQKFKGKATLTVDKSSSTAYMELLSLTSEDSAVYYCARSLRFSFDYWGQGTTLTVSS

SEQ ID NO: 145 - protein, 121 aa, Mus musculus
QIQLVQSGPELKKPGETVKISCKASGYTFTDYSMHWVKQAPGKGLKWMGWINTETGVPTYADDFKGRFAFSLETSASTAFLQINNLKNEDTATYFCARTDYGNPYWYFDVWGAGTTVTVSS

SEQ ID NO: 146 - protein, 119 aa, Mus musculus
EVQLQQSGPELVKPGASVKISCKASGYSFTGYTMNWVKQSHGKNLEWIGLIIPYNGGTSYNQKFKDKASLTFDKSSSTAYMELLSLTSEDSAVYYCARGFRGYFAVDYWGQGTSVTVSS

SEQ ID NO: 147 - protein, 119 aa, Mus musculus
QVQLQQPGAELVRPGVSVKLSCKASGYTFTSYWMHWIKQRPEQGLERIGEIDPTNDYSNYNEKFKSKATLTVDKSSSTAYMHLTSLTSEDSAVYYCARSRGKDWYFDVWGAGTTVTVSS

SEQ ID NO: 148 - protein, 117 aa, Mus musculus
QAYLQQSGAELVRSGASVKVSCKASGYTFTSFNMHWVKQTPGQGLEWIGYFFPGNGATNYNQKFKGKATLTADTSSSTAYMQISSLTSEDSAVYFCAREGWLSLGYWGQGTTLTVSS

SEQ ID NO: 149 - protein, 120 aa, Mus musculus
QVQLQQSGGDLMKPGASVKISCKATGYTFSNYWIEWVKQRPGHGLEWIGEIFPGGGSAYYNEKFRGKATFTADKSSDTAYMQLSSLTSEDSAVYYCARQKYGNYYYFDYWGQGTTLTVSS

SEQ ID NO: 150 - protein, 119 aa, Mus musculus
EVQLQQSGPELVKPGASMKISCKASGYSFTGYTMNWVKQSHGKNLEWIGLFIPYNGGTSYNQNFRGKATLTVDKSSSTAYMELLSLTSEDSAVYYCARGLRGFFSMDYWGQGTSVTVSS

SEQ ID NO: 151 - protein, 119 aa, Mus musculus
EVQLQQSGPELVKPGASMKISCKASGYSFTGYTMNWVKQSHGKNLEWIGLIIPYNGGTSYNQKFKDKATLTIDKSSSTAYMELLSLTSEDSAVYYCARGFRGYFAVDYWGQGTSVTVSS

SEQ ID NO: 152 - protein, 119 aa, Mus musculus
QVQLKESGPDLVAPSQSLSITCTVSGFSLTSYGVHWVRQPPGKGLEWLVVIWSDGSTTYNSALKSRLSISKDNSKSQVFLKMNSLQTDDTAMYYCARQIYYDYGWFAYWGQGTLVTVSA

SEQ ID NO: 153 - protein, 119 aa, Mus musculus
EVHLQQSGPELVKPGASMKISCKASGYSFTDYIMNWVKQSHGKNLEWIGLIIPYNGGTSYNQKFKGKATLTVDKSSSTAYMEFLSLTSEDSAVYYCARGLRGYYAMDYWGQGTSVTVSS

SEQ ID NO: 154 - protein, 120 aa, Mus musculus
QVQLEQSGGEVMKPGASVKISCKATGYTFSNYWIEWVKQRPGHGPEWIGEILPGSGSAYYNEKFRGKATFTADKSSNTAYMQLSSLTSEDSAVYYCARQKYGNYYYFDYWGQGTTLTVSS

SEQ ID NO: 155 - protein, 121 aa, Mus musculus
QIQLVQSGPELRKPGETVKISCKASGYTFTDYSMHWVKQAPGKGLKWMGWINTETGEPTYADDFKGRFAFSLETSASTAHLQINNLKNEDTATYFCTRTDYGNPYWYFDVWGAGTTVTVSS

SEQ ID NO: 156 - protein, 119 aa, Mus musculus
EVQLQQSGPELVKPGASVKISCKASGYSFTGYTMNWVKQSHGKNLEWIGLIIPYNGGTSYNQKFKDKATLTIDKSSSTAYMELLSLTSEDSAVYYCARGFRGYFAVDYWGQGTSVTVSS

SEQ ID NO: 157 - protein, 117 aa, Mus musculus
EVQLQQSGPELVKPGASMKISCKASGYSFTGYTMNWVKQSHGKNLEWIGLISPYNGGTSYNQKFKGKATLTVDKSSSTVYMELLSLTSEDSAVYYCARSLRFSFDYWGQGTTLTVSS

SEQ ID NO: 158 - protein, 118 aa, Mus musculus
EVQLQQSGPELVKPGASMKISCKASGYSFTGYTMNWVKQSHGKNLEWIGLINPYNGGTSYNQKFKGKATLTVDKSSSTAYMELLSLTSEDSAVYYCARRNYGYYFDYWGQGTTLTVSS

SEQ ID NO: 159 - protein, 120 aa, Mus musculus
EVKLVESGGGLVKPGGSLKLSCAASGFDFSRYDMSWVRQTPEKRLEWAATISSGGSYTYQPDSVKGRFTISRDNARNTLYLQMSSLRSEDTALYYCARQDYRYPYIMDYWGQGTSVTVSS

SEQ ID NO: 160 - protein, 120 aa, Mus musculus
QVTLKESGPGILQPSQTLSLTCSFSGFSLSTYGIGVGWIRQPSGKGLEWLAHIWWNDNKYYNTALKSRLTISKDTSNNQVFLKIASVDTAETATYYCARIGSGKFYFDYWGQGTTLTVSS

SEQ ID NO: 161 - protein, 122 aa, Mus musculus
QVQLKESGPGLVAPSQSLSITCTVSGFSLTRHGVHWVRQPPGKGLEWLGVIWPGGNTKFNSTLMSRLSISKDNSKSQVFLKMNTLQTDDTAMYYCARSGGYGNFAPYYFDQWGQGTTLTVSS

SEQ ID NO: 162 - protein, 117 aa, Mus musculus
QVQLQQSGAELVKPGASVKMSCKASGYTFTNYWMHWVKLRPGQGLEWIGVIDPSDSFPTYNQKFKGKATLTVDTSSSTAYMQLSSLTSEDSAVYYCTRGPRGYGDYWGQGTSVTVSS

SEQ ID NO: 163 - protein, 117 aa, Mus musculus
QVQLQQPGSELVRPGASVKLSCKASGYTFTSYWIHWVKQRHGQGLEWIGNIFPGSGTSNYDEKFNNKGTLTVDTSSSTSYMHLSSLTSEDSAVYYCAREGLYAFDYWGQGTTLTVSS

SEQ ID NO: 164 - protein, 117 aa, Mus musculus
QAYLQQSGAELVRSGASVKMSCKASGYTFTSYNMHWVKQTPGQGLEWIGKIFPGNGFTDYNQKFRDKATLTADTSSSTAYMQISSLTSEDSAVYFCTREGWLSLGYWGQGTTLTVSS

SEQ ID NO: 165 - protein, 119 aa, Mus musculus
EVQLQQSGPELVKTGASVKISCKASGYAFTGYYIHWVKQSHGKSLEWIGHITCYNGATNYNQNFKGKATFTVDTSSSTAYMQFNSLTSEDSAVYYCARSNYRPWYFDVWGAGTTVTVSS

SEQ ID NO: 166 - protein, 120 aa, Mus musculus
QVQLQQSGGDLMKPGASVKISCKATGYTFSNYWIEWVKQRPGHGLEWIGEIFPGGGSAYYNEKFRGKATFTADKSSDTAYMQLSSLTSEDSAVYFCARQKYGNYYYFDYWGQGTTLTVSS

SEQ ID NO: 167 - protein, 117 aa, Mus musculus
QVQLQQPGSELVRPGASVKLSCKASGYTFTSFWIHWVKQRPGQGLEWIGNIFPGGGDPNYDEKFRTKGTLTVDTSSSTAYMHLSSLTSEDSAVYFCAREGLYAFDYWGQGTTLTVSS

SEQ ID NO: 168 - protein, 120 aa, Mus musculus
QVQLQQSGGEVMKPGASVKMSCKASGYTFSNYWIEWLRQRPGHGLEWIGEIFPGSDSSYYNERFKGKATFTTDKSSDTAYMQLSSLTSEDSAVYYCARQKYGNFYYFDYWGQGTTLKVSS

SEQ ID NO: 169 - protein, 122 aa, Mus musculus
QVQLKESGPGLVAPSQSLSITCTVSGFSLTRHGVHWVRQPPGKGLEWLGVIWPGGSTKYNSALMSRLSINKDNSKSQVFLKMNSLQTADTAMYYCARSGGYGNFAPYYFDQWGQGTTLTVSS

SEQ ID NO: 170 - protein, 117 aa, Mus musculus
QAYLQQSGAELVRSGASVKMSCKASGYTFTSYNMHWVKQTPGQGLEWIGKIFPGNGFTDYNQNFRDKATLTADTSSSTAYMQISSLTSEDSAVYFCTREGWLSLGYWGQGTTLTVSS

SEQ ID NO: 171 - protein, 117 aa, Mus musculus
QVQLQQPGSELVRPGASVKLSCKASGYTFTSYWMHWVKQRHGQGLEWIGNIFPGSGTTNYDEKFKNKGTLTVDTSSSTAYMHLSSLTSEDSAVYYCAREGLYAFDYWGQGTTLTVSS

SEQ ID NO: 172 - protein, 117 aa, Mus musculus
QVQLQQPGSELVRPGASVKLSCKASGYTFTSYWMHWVKQRHGQGLEWIGNIFPGSGTNNYDEKFKNKGTLTVDTSSSTAYMHLSSLTSEDSAVYYCAREGLYAFDYWGQGTTLTVSS

SEQ ID NO: 173 - protein, 119 aa, Mus musculus
EVQLQQSGPELVKPGASMKISCKASGYSFTGYTMNWVKQSHGKNLEWLGLIFPYNSATSYNQKFTGKATITVDKSSNTTYMELLSLTSEDSAVYYCARGLRGFFALDYWGQGTSVTVSS

SEQ ID NO: 174 - protein, 117 aa, Mus musculus
QVQLQQPGSELVRPGASVKLSCKASGYTFTSYWIHWVKQRHGQGLEWIGNIFPGSGTSNYDEKFKNKGTLTVDTSSSTAYMHLSSLTSEDSAVYYCAREGLYAFDYWGQGTTLTVSS

SEQ ID NO: 175 - protein, 122 aa, Mus musculus
QVQLKESGPGLVAPSQSLSITCTVSGFSLTRHGVHWVRQPPGKGLEWLGVIWPGGNTKFNSTLMSRLSISKDNSKSQVFLKMNTLQTDDTAMYYCASSGGYGNFAPYYFDQWGQGTTLTVSS

SEQ ID NO: 176 - protein, 120 aa, Mus musculus
EVKLVESGGGLVKPGGSLKLSCAASGFAFSTYDMSWVRQTPEKRLEWVATISSGGSYTYYPDSVKGRFTISRDNARNTLYLQMSSLRSEDTALYYCARQDYRYPYIMDYWGQGTSVTVSS

SEQ ID NO: 177 - protein, 118 aa, Mus musculus
EVQLQQSGPELEKPGSSVKISCKASGYSFTDYNMHWVKQSNGKSLEWIGDIDVYYSGTSYNQKFKGKATLTVDKSSSTTYMELKSLTSEDSAVYFCARSSLRWYFDLWGAGTTVTVSS

SEQ ID NO: 178 - protein, 120 aa, Mus musculus
QVQLQQSGGEVMKPGASVKISCKATGYTFSNYWIEWVKQRPGHGLEWIGEILPVSGSAYYNEKFRGKATFTADKSSNTAYMQLSSLTSEDSAVYYCARQKYGNYYYFDYWGQGTTLTVSS

SEQ ID NO: 179 - protein, 117 aa, Mus musculus
QTFLQQSGAELVRSGASVKMSCRASGYTFSSHNMHWIKQTPGQGLEWIGKIFPGNGFTDYNQKFRDKATLTADTSSSTAYMQIGSLTSEDSAVYFCTREGWLSLGYWGLGTTLTVSS

SEQ ID NO: 180 - protein, 119 aa, Mus musculus
EVQLQQSGPELVKPGASMKISCKASGYSFTDYTMNWVKQSHGKNLEWLGLIFPYNGATSYNQKFKGKATITVDKSSSTAYMELLSLTSEDSAVYYCARGLRGFFALDYWGQGTSVTVSS

SEQ ID NO: 181 - protein, 117 aa, Mus musculus
EVQLQQSGPELVKPGASMKISCKASGYSFTGYIMNWVKQSHGKNLEWIGLIVPNNGGTSYNQKFKGKATLTVDKSSNTAYMELLSLTSEDSAVYYCARSLRFSFDYWGQGTTLTVSS

SEQ ID NO: 182 - protein, 119 aa, Mus musculus
QITLKESGPGIVQPSQPFRLTCTFSGFSLSTSGIGVTWIRQPSGKGLEWLATIWWDDDTRYNPSLKSRLTVSKDTSNNQAFLNILTVETADTAIYYCAQSGGITLMDYWGQGTSVTVSS

SEQ ID NO: 183 - protein, 117 aa, Mus musculus
EVQLQQSGPELVKPGASMKISCKASGYSFTGYTMNWVKQSHGKNLEWIGLIVPYNGGTSYNQKFKGKATLTVDKSSSTAYMELLSLTSEDSAVYYCARSLRFSFDYWGQGTTLTVSS

SEQ ID NO: 184 - protein, 115 aa, Mus musculus
EVKLVESGGGLVQPGGSLRLSCATSGFTFTDYYMSWVRQPPGKALEWLALIRNKAKGYTTEYSASVKGRFTISRDNSQSILYLQMNTLRAEDSATYYCARDGGYWGQGTTLTVSS

SEQ ID NO: 185 - protein, 120 aa, Mus musculus
QVSLKESGPGILQPSQTLSLTCSFSGFSLSTSGMGVGWIRQPSGKGLEWLAHIWWDDVKRYNPALESRLTISKDSSSSQVFLKIASVDTADTATYYCARIAVGQAWFAYWGQGTLVTVSS

SEQ ID NO: 186 - protein, 117 aa, Mus musculus
EVQLQQSGPELVKPGASMKISCKASGYSFTGYTMNWVKQSHGKNLEWIGLIFPYNGGTSYNQKFKGKATLTVDKSSSTAYMELLSLTSEDSAVYYCARSLRFSFDYWGQGTTLTVSS

SEQ ID NO: 187 - protein, 120 aa, Mus musculus
QVQLQQSGAELVRPGTSVKISCKPSGYIFTNYWLGWVKQRPGHGLEWIGDIYPGGGYTNYNEKFKGRATLTADTSSSTAYMQLSSLTSEDSAVYFCARSRQLASYAMDYWGQGTSVTASS

SEQ ID NO: 188 - protein, 119 aa, Mus musculus
EVQLQQSGPEMVKPGASMKISCKASGYSFTGYTMNWVKQSHGKNLEWLGLIFPYNSATSYNQKFTGKATITVDKSSNTTYMELLSLTSEDSAVYYCARGLRGFFALDYWGQGTSVTVSS

SEQ ID NO: 189 - protein, 115 aa, Mus musculus
EVNLVESGGGLVQPGGSLRLSCATSGFPFNDYYMSWVRQPPGKALEWLCLIRNKANGYTTEYSSSVKGRFTISRDNSQSILYLQMNTLRAEDSATYYCARDGGYWGQGTTLTVSS

SEQ ID NO: 190 - protein, 117 aa, Mus musculus
QAYLQQSGAELVRSGASVKMSCKASGYTFTSYNLHWVKQTPGQGLEWIGYIYPGNGYTNYNQKFKGKATLTADTSSSTAYMQISSLTSEDSAVYFCAREGGWAMDYWGQGTSVTVSS

SEQ ID NO: 191 - protein, 118 aa, Mus musculus
EVQLQQSGPELVKPGASMKISCKASGYSFTGYTMNWVRQSHGKNLEWIGLINPYNGGTSYNQKFKGKATLTVDKSSSTAYMELRSLTSEDSAVYYCARRNYGYYFDYWGQGTTLTVSS

SEQ ID NO: 192 - protein, 119 aa, Mus musculus
QITLKESGPGIVQPSQPFRLTCTFSGFSLSTSGIGVTWIRQPSGKGLEWLATIWWDDDNRYNPSLKSRLTVSKDTSNNQAFLNIITVETADTAIYYCAQSGGITLMDYWGQGTSVTVSS

SEQ ID NO: 193 - protein, 115 aa, Mus musculus
EVKLVESGGGLVQPGGSLRLSCATSGFTFTDYYMSWVRQPPGKALEWLALIRNKAHGYTTEYSASVKGRFTISKDNSQSILYLQMNTLRAEDSATYYCARDGGYWGQGTTLTVSS

SEQ ID NO: 194 - protein, 117 aa, Mus musculus
EVQLQQSGTVLARPGASVKMSCKTSDYSFTSYWMHWVKQRPGQGLEWIGAIYPGNSAARYNQKFKGKAKLTAVTSANTAYMELSSLTNEDSAVYYCSREGGYGLDYWGQGTSVTVSS

SEQ ID NO: 195 - protein, 120 aa, Mus musculus
QVQLQQSGGEVMKPGASVKISCQATGYTFSNYWIEWLKQRPGHGLEWIGEILPVSGSSYYNEKFRGKATFSADKSSNTAYMQLSSLTSEDSAVYYCARQKYGNYYYFDYWGQGTTLTVSS

SEQ ID NO: 196 - protein, 120 aa, Mus musculus
QVQLQQSGGDLMKPGASVKISCKATGYTFSNYWIEWVKQRPGHGLEWIGEILPGSGSSYYNEKFKGKAIFTADTSSSTAYMQLSSLTSEDSAVYYCARQKYGNYYYFDFWGQGTSLTVSS

SEQ ID NO: 197 - protein, 121 aa, Mus musculus
EVMLVESGGGLVEPGGSLKLSCAASGFTFSTYAMSWVRQTPEKRLEWVATISSGGTYTYYPDSVKGRFTISRDNAKNTLYLQMSSLRSEDTAMYYCARHFISTIITHFDYWGHGTTLTVSS

SEQ ID NO: 198 - protein, 117 aa, Mus musculus
EVQLQQSGTVLARPGASVKMSCKASGYSITSYWMHWVKQRPGQGLEWIGGVYPGNSNTNYNQKFKGKAKLTAVTSASTAYMELSSLTNEDSAVYYCTREGGYGMDYWGQGTSVTVSS

SEQ ID NO: 199 - protein, 117 aa, Mus musculus
QVQLQQPGSELVRPGASVKLSCKASGYTFTSYWMHWVKQRHGQGLEWIGNIFPGSGTTNYDEKFKNKGTLTVDTSSNIAYMHLSSLTSEDSAVYYCAREGLYAFDYWGQGTTLTVSS

SEQ ID NO: 200 - protein, 121 aa, Mus musculus
QIQLVQSGPELKKPGETVKISCKASGYTFTDYSMHWVKQAPGKGLKWMGWINTETGEPTYADDFKGRFAFSLETSASTAYLQINNLKNEDTATYFCTRTNYGNPYWYFDVWGAGTTVTVSS

SEQ ID NO: 201 - protein, 115 aa, Mus musculus
EVNLVESGGGLVQPGGSLRLSCATSGFTFNDYYMSWVRQPPGKALEWLCLIRNKANGYTTEYSASVKGRFTISRDNSQSILYLQMNTLRAEDSATYYCARDGGYWGQGTTLTVSS

SEQ ID NO: 202 - protein, 119 aa, Mus musculus
EVQLQQSGPELVKPGASMKISCKASGYSFIDYIMNWVKQSHGKNLEWIGLIIPYNGGTSYNQKFKGKATLTVDKSSSTASMEFLSLTSEDSAVYYCARGLRGYYAMDYWGQGTSVTVSS

SEQ ID NO: 203 - protein, 117 aa, Mus musculus
QVQLQQPGSELVRPGASVKLSCKASGYTFTSYWMHWVKQRHGQGLEWIGNIFPGTGSANYDERFKNKGTLTVDTSSSTAYMHLSSLTYEDSAVYYCTREGLYPFDYWGQGTTLTVSS

SEQ ID NO: 204 - protein, 116 aa, Mus musculus
QVQLKQSGPGLVQPSQSLSITCTVSGFSLTSYGVHWVRQSPGKGLEWLGVIWSGGSTDYNAAFISRLSISKDNSKSQVFFKMNSLQTNDTAIYYCAREVRRYFDVWGAGTTVTVSS

SEQ ID NO: 205 - protein, 119 aa, Mus musculus
QITLKESGPGIVQPSQPFRLTCTFSGFSLSTSGIGVTWIRQPSGKGLEWLATIWWDDDNRYNPSLKSRLTVSKDTSNNQVFLNIIALETADTAMYYCAQSGGITLMDYWGQGTSVTVSS

SEQ ID NO: 206 - protein, 119 aa, Mus musculus
EVQLQQSGPELVRPGGSMKISCKASGYSFTGYTMNWVKQSHGQNLEWIGLIIPYNGGSSYNQKFQGKATLTVDKSSSTAYMELLSLTSEDSAVFYCARGLRGYFAMDYWGQGTSVTVSS

SEQ ID NO: 207 - protein, 117 aa, Mus musculus
QAYLQQSGAELVRSGASVKMSCKASGYTFTSYNLHWVKQTPGQGLKWIGYIYPGNGYTHYNQKFKGKATLTADTSSSTAYMQINSLTSEDSAVYFCAREGGWAMDYWGQGTSVTVSS

SEQ ID NO: 208 - protein, 120 aa, Mus musculus
QVQLQQSGGELMKPGASVKISCKATGYTFSNYWIEWVKQRPGHGLEWIGEILPGSGSSYYNEKFKGRATFTADKSSNTAYMQLSSLTSEDSAVYYCARQKYGNFYYFDFWGQGTTLTVSS

SEQ ID NO: 209 - protein, 114 aa, Mus musculus
QIQLVQSGPELKKPGETVKISCKASGYTFTNYGMNWVKQAPGKGLKWMGWISTYIGEPTCADDFKGRFAFSLDTSASTAYLQINNLKNEDTATYFCARDSFAHWGQGTLVTVSA

SEQ ID NO: 210 - protein, 117 aa, Mus musculus
QAYLQQSGAELVRSGASVKMSCKASGYTFTSYNLHWVKQTPGQGLKWIGYIYPGNGYTNYNQKFKGKATLTADTSSSTAYMQINSLTSEDSAVYFCAREGGWAMDYWGQGTSVTVSS

SEQ ID NO: 211 - protein, 117 aa, Mus musculus
QVQLQQPGSELVRPGASVKLSCKASGYTFTSFWMHWVKQRHGQGLEWIGNIYPGSGTTNFDEKFKSKVTLTVDTSSSTAFMHLSSLTSEDSAVYYCTREGLYAFDQWGQGTTLTVSS

SEQ ID NO: 212 - protein, 120 aa, Mus musculus
QVQLQQSGAELVRPGTSVKISCKASGYTFTIHWLGWVRQRPGHGLEWIGDIYPGGGYTNYNEKFKGKATLTADTSSSTAYMQFSSLTSEDSAVYFCARDYGYDVYAMDYWGQGTSVTVSS

SEQ ID NO: 213 - protein, 120 aa, Mus musculus
EVKLVESGGGLVKPGGSLKLSCAASGFAFSSFDMSWVRQTPEKRLEWVAVISSGGSYTFYPDSVKGRFTISRDNARNTLYLQMSSLRSEDTALYFCTRQDYRYPYIMDYWGQGTSVTVSS

SEQ ID NO: 214 - protein, 120 aa, Mus musculus
QVQLQQSGAELVRPGTSVKISCKPSGYIFTNFWLGWVKQRPGHGLEWIGDIYPGGGYTNYNEKFKGRATLTADTSSSTAYMQLSSLTSEDSAVYFCARSRQLASYAMDYWGQGTSVTASS

SEQ ID NO: 215 - protein, 115 aa, Mus musculus
EVKLVESGGGLVQPGGSLRLSCATSGFTFTDYYMSWVRQPPGKALEWLALIRNKAHGYTTEYSASVKGRFTISRDNSQSILYLQMNTLRAEDSATYYCARDGGYWGQGTTLTVSS

SEQ ID NO: 216 - protein, 115 aa, Mus musculus
EVNLVESGGGLVQPGGSLRLSCATSGFTFNDYYMAWVRQPPGKALEWLCLIRDKANGYTTEYSASVKGRFTISRDNSQSILYLQMNTLRAEDSATYYCARDGGYWGQGTTLTVSS

SEQ ID NO: 217 - protein, 118 aa, Mus musculus
EVQLQQSGPELEKPGSSVKISCKASGYSFSDYNMHWVKQSNGKSLEWIGNIDVYYLSTSYNQKFKGKATLTVDRSSSTAYMQLKSLTSEDSAVYFCARSLLRWYFDVWGAGTTVTVSS

SEQ ID NO: 218 - protein, 117 aa, Mus musculus
EVQLQQSGPELVKPGASMKISCKASGYSFTGYTMNWVKQSHGKNLEWIGLIIPYNGGTSYNQKFKGKATLTVDKSSSTAYMELLSLTSEDSAVYFCARSLRFSFDYWGQGTSLTVSS

SEQ ID NO: 219 - protein, 117 aa, Mus musculus
QVQLQQPGSELVRPGASVKLSCKASGYTFTSYWIHWVKQRHGQGLEWIGNIFPGSGTTNYDEKFKSRGTLTVDTSSSTAYMHLSSLTSEDSAIYYCTREGLYSFDYWGQGTTLTVSS

SEQ ID NO: 220 - protein, 117 aa, Mus musculus
QVQLQQPGSELVRPGASVKLSCKASGYTFTSYWMHWVKQRHGQGLEWIGNIFPGSGITNYDEKFKNKGTLTVDTSSSTAYMHLSSLTSEDSAVYYCAREGLYAFDYWGQGTTLTVSS

SEQ ID NO: 221 - protein, 117 aa, Mus musculus
QAYLQQSGAELVRSGASVKMSCKASGYTFTSYNMHWVKQTPGQGLEWIGKIFPGNGFTDYNQRFRDKATLTADTSSSTAYMQISNLTSEDSAVYFCTREGWLSLGYWGQGTTLTVSS

SEQ ID NO: 222 - protein, 117 aa, Mus musculus
EVQLQQSGPELVKPGASMKISCKASGYSFTGYTMNWVKQSHGKNLEWIGLIVPNNGGTSYNQKFKGKATLTVDKSSSTAYMELLSLTSEDSAVYYCARSLRFSFDYWGQGTTLTVSS

SEQ ID NO: 223 - protein, 114 aa, Mus musculus
QIQLVQSGPELKKPGETVKISCKASGYIFTNYGMNWVKKAPGKGLKWMGWINSYTGESTYGDDFKGRFAFSSETSASTAYLQINNLKKEDTATYFCARDSFAYWGQGTLVTVSA

SEQ ID NO: 224 - protein, 117 aa, Mus musculus
QAYLQQSGAELVRSGASVKMSCKASGYTFTSYNMHWVKQTPGQGLEWIGKIFPGNGFTDYNQIFRDKATLTADTSSSTAYMQISSLTSEDSAVYFCTREGWLSLGYWGQGTTLTVSS

SEQ ID NO: 225 - protein, 116 aa, Mus musculus
QVQLQQPGAELVKPGASVKMSCKASGYTFTTFWINWVKQRPGQGLEWIGDIFPGRGITNYNGKFKNKATLTLDTSSSTAYMQLSSLTSEDSAVYYCSRGLGYFDVWGAGTTVTVSS

SEQ ID NO: 226 - protein, 115 aa, Mus musculus
EVNLVESGGGLVQPGGSLRLSCATSGFTFNDYYMSWVRQPPGKALEWLCLIRDKANGYTTEYSASVKGRFTISRDNSQSILYLQMNTLRAEDSATYYCARDGGYWGQGTTLTVSS

SEQ ID NO: 227 - protein, 117 aa, Mus musculus
QVQLQQPGSELVRPGASVKLSCKASGYTFTSYWMHWVKQRHGQGLEWIGNIFPGTGSTNYDERFKNKGTLTVDTSSSTAYMHLSSLTYEDSAVYYCTREGLYPFDYWGQGTTLTVSS

SEQ ID NO: 228 - protein, 118 aa, Mus musculus
EVQLQQSGPELEKPGSSVKISCKASGYSFTDYNMHWVKQSNGKSLEWIGNIDVYYSGTSYNQKFRGKATLTVDKSSSTAYMELKSLTSEDSAVYFCARSLLRWYFDVWGAGTTVTVSS

SEQ ID NO: 229 - protein, 121 aa, Mus musculus
EVMLVESGGGLVKPGGSLKLSCAASGFTFSTYAMSWVRQTPEKRLEWVATISSGGSYTYYPDSVKGRFTISRDNAKNTLYLQMSSLRSEDTAMYYCARHFISTIITHFDYWGHGTTLTVSS

SEQ ID NO: 230 - protein, 119 aa, Mus musculus
QVQLQQSGPELVKPGASVKMSCKASGYTFTSYYIHWVKQRPGQGLEWIGWIYPGDGSTKYNEKFKGKTTLTADKSSSTAYMLLSSLTSEDSAIYFCTRDGNYGDWFPYWGQGTLVTVSA

SEQ ID NO: 231 - protein, 120 aa, Mus musculus
QVQLQQSGGEVMKPGASVKISCKATGYTFSNYWIEWVKQRPGHGLEWIGEILPVSDSAYYNEKFRGKATFTADKSSNTAYMQLSTLTSEDSAVYYCARQKYGNYYYFDYWGQGTTLTVSS

SEQ ID NO: 232 - protein, 117 aa, Mus musculus
EVQLQQSGPELVKPGASMKISCKASGYSFTGYTMNWVKQSHGKNLEWIGLIVPYNGGTSYNQKFKGKATLTVDKSSSTAYMELLSLTSEDSAVYYCARSVRFSFDYWGQGTTLTVSS

SEQ ID NO: 233 - protein, 114 aa, Mus musculus
QIQLVQSGPELQKPGETVKISCKASGYTFTNYGMNWVKKAPGKGFKWMGWINTYTGESTYADDFKGRFAFSSETSASTVFLQINNLKNEDTATYFCARDSFAYWGQGTLVTVSA

SEQ ID NO: 234 - protein, 122 aa, Mus musculus
EVQLQQSGPDLVKPGASVKISCKASGYSFTGYYMHWVKQSHGKSLEWIGRVNPNNGGTSYNQKFKDKAVLTVDKSSSTAYMEFRSLTSEDSAVYYCASSPLLRLRGYAMDDWGQGTSVTVSS

SEQ ID NO: 235 - protein, 116 aa, Mus musculus
QVQLQQPGAELVKPGASVKMSCKASGYTFTSFWINWVKQRPGQGLEWIGDIYPGRGITNYNGEFKSKATLTLDTSSSTAYMQLSSLTSEDSAVYYCSRGLGYFDVWGAGTTVTVSS

SEQ ID NO: 236 - protein, 117 aa, Mus musculus
QVQLQQPGSELVRPGVSVKLSCKASGYTFTSYWMHWVKQRHGQGLEWIGNIFPGSGTTNYHEKFKNKGTLTVDTSSSTAYMHLSSLTSEDSAVYYCSREGLYPFDYWGQGTTLTVSS

SEQ ID NO: 237 - protein, 119 aa, Mus musculus
QVQLKESGPGLVAPSQSLSITCTVSGFSLTSYDISWIRQPPGKGLEWLGVIWTGGGTNYNSAFMSRLSISKDNSKSQVFLKMNSLQTDDTAIYYCVRSTMITHYAMDYWGQGTSVTVSS

SEQ ID NO: 238 - protein, 117 aa, Mus musculus
QVQLQQPGSELVRPGASVKLSCKASGYTFTSYWMHWVKQRHGQGLEWIGNIYPGSGTTNYDEKFKNKGTLTVDTSSSTAYIHLSSLTSEDSAVYYCTREGLYPFDYWGQGTTLTVSS

SEQ ID NO: 239 - protein, 117 aa, Mus musculus
QVQLQQPGSELVRPGASVKLSCKASGYTFTSYWMHWVKQRHGQGLEWIGNIFPGSGITNYDEKFKNKGTLTVDTSSNTAYMHLSSLTSDDSAVYYCAREGLYAFDYWGQGTTLTVSS

SEQ ID NO: 240 - protein, 118 aa, Mus musculus
EVQLQQSGPELEKPGSSVKISCTASGFSFTDYNIHWVKQSNGKSLEWIGDVDIYYSGTSYNQKFKGKATLTVDKSSSTTYMELKSLTSEDSAVYFCARSSLRWYFDLWGAGTTVTVSS

SEQ ID NO: 241 - protein, 117 aa, Mus musculus
QVQLQQPGAELVKPGASVKMSCKASGYTFSNYWMHWVKQRPGQGLEWIGTIDPSDSYTSYNPKFKGKATLTVDPSSSTAYMQLSSPTSEDSAVYYCTRPSSYFFDYWGQGTTLTVSS

SEQ ID NO: 242 - protein, 117 aa, Mus musculus
QAYLQQSGAELVRSGASVKMSCKASGYTFTSYNMHWVRQTPGQGLEWIGSIYPGNDGTNYIQKFKGKATLTTDTSSSTAYMQISSLTSEDSAVYFCAREGWLSLDYWGQGTTLTVSS

SEQ ID NO: 243 - protein, 119 aa, Mus musculus
EVQLQQSGPELVKPGASMKISCKASGYSFTGNIMNWVKQSHEKNLEWIGLINPYNGGTSYNQKFKGKATLTVDKSSSTAYMELLSLTSEDSAVYYCARGFRGYFAMDYWGQGTSVTVSS

SEQ ID NO: 244 - protein, 115 aa, Mus musculus
EVQLQQSGPELVKPGASVKISCKASGYTFTDYNMHWVKQSHGKSLEWIGYIYPYNVGTAYNQKFKGKATLTVDNSSSTAYMELRSLTSEDSAVYYCARKNPLDYWGQGTTLTVSS

SEQ ID NO: 245 - protein, 120 aa, Mus musculus
QVQLQQSGGELMKPGASVKISCKATGYTFSNCWIEWVKQRPGHGLEWIGEILPGSGSAYYNEKFKGKATFTADKSSNTAYMQLSSLTSEDSAVYYCARQKYGNYYYFDYWGQGTTLTVSS

SEQ ID NO: 246 - protein, 117 aa, Mus musculus
EVQLQQSGTVLARPGASVKMFCKASGYSFTSYWMHWVKQRPGQGLEWIGAFYPGNSATNYNQKFKGKAKLTAVTSASTAYMELSSLTNEDSAVYYCSREGGYGMDHWGQGASVTVSS

SEQ ID NO: 247 - protein, 120 aa, Mus musculus
EVKLVESGGGLVKPGGSLKLSCAASGFAFSSFDMSWVRQTPEKRLEWVAVISSGGSYTFYPDSVKGRFTISRDNARNTLYLQMSSLRSEDTALYYCARQDYRYPYIMDYWGQGTSVTVSS

SEQ ID NO: 248 - protein, 117 aa, Mus musculus
EVQLQQSGPELVKPGASMKISCKASGYSFTGYTMNWVKQSHGKNLEWIGLIIPYNGGTSYNQKFKGKATLTVDKSSSTAYMELLSLTSEDSAVYYCARSLRFSFDYWGQGTSLTVSS

SEQ ID NO: 249 - protein, 118 aa, Mus musculus
QAYLQQSGAELVRSGASVKMSCKASGYTFSNYNMHWVKQTPGQGLEWIGYIFPGNGVTTYSQKFKDKATLTADTSSSTAYMQISSLTSEDSAVYFCARGGFGGALDYWGQGTSVTVSS

SEQ ID NO: 250 - protein, 118 aa, Mus musculus
QAYLQQSGAELVRSGASVKMSCKASGYTFSNYNMHWVKQTPGQGLEWIGYIFPGNGVTTYSQKFKDKATLTADTSSSTAYMQISSLTSEDSAVYFCARGGFGGAMDYWGQGTSVTVSS

SEQ ID NO: 251 - protein, 119 aa, Mus musculus
QITLKESGPGIVQPSQPFRLTCTFSGFSLSTSGIGVTWIRQPSGKGLEWLATIWWDDDNRYNPSLKNRLTVSKDTSNNQAFLNFITVETADTAIYYCAQSGGITLMDYWGQGTSVTVSS

SEQ ID NO: 252 - protein, 119 aa, Mus musculus
QITLKESGPGIVQPSQPFRLTCTFSGFSLSTSGIGVTWIRQPSGKGLEWLATIWWDDDNRYNPSLKSRLTVSKDTSNNQVFLNIIDVESADTAMYYCAQSGGITLMDYWGQGTSVTVSS

SEQ ID NO: 253 - protein, 114 aa, Mus musculus
QIQLVQSGPELKKPGETVKISCKASGYTFTNFGMNWVKQTPGKGLKWMGWINTYTGEPTYADDLKGRFALSLETSAGTSYLQINTLRDEDTATYFCARDSFAHWGQGTLVTVSA

SEQ ID NO: 254 - protein, 117 aa, Mus musculus
QAYLQQSGAELVRSGASVKMSCKASGYTFTSYNMHWVKQTPGQGLEWIGYIYPGNGFTNYNQKFKGKATLTADTSSSTAYMQISSLTSEDSAVYFCAREGGWAMDYWGQGTSVTVSS

SEQ ID NO: 255 - protein, 117 aa, Mus musculus
EVQLQQSGPELVKPGASMKISCKASGYSFTGYTMNWVKQSHGKSLEWIGLIIPYNGGTSYNQKFKGKATLSVDKSSSTAYMELLSLTSEDSAVYYCARSLRFSFDYWGQGTTLTVSS

SEQ ID NO: 256 - protein, 117 aa, Mus musculus
QVQLQQPGSELVRPGASVKLSCKASGYTFTSYWMHWVKQRHGQGLEWIGNIFPGSGTTNYDEKFKSKGTLTVDTSSSTAYMHLSSLTSEDSAVYYCTREGLYAFDYWGQGTTLTVSS

SEQ ID NO: 257 - protein, 115 aa, Mus musculus
EVKLVESGGGLVQPGGSLRLSCATSGFTFTDYYMSWVRQPPGKALEWLALIRNKANGYTTEYSASVKGRFTISRDNSQSILYLQMNTLRAEDSATYYCARDGGYWGQGTTLTVSS

SEQ ID NO: 258 - protein, 117 aa, Mus musculus
QVQLQQPGSELVRPGASVKLSCKASGYTFTSYWMHWVKQRHGQGLEWIGNIYPGGGTTNYDEKFRNKATLTVDTSSSTAYMHLSSLTSEDSAVYYCTREGLYPFDYWGQGTTLTVSS

SEQ ID NO: 259 - protein, 117 aa, Mus musculus
EVQLQQSGTVLARPGASVKMSCKTSGYSFTSYWMHWVKQRPGQGLEWIGGIYPGNSDTTYNQKFKGKAKLTAVTSASTAYMELSSLTNEDSAVYYCTREGGYGMDYWGQGTSVTVSS

SEQ ID NO: 260 - protein, 117 aa, Mus musculus
QVQLQQPGSELVRPGASVKLSCKASGYTFTSYWIHWVKQRHGQGLEWIGNIFPGSGTSNYDERFKNMGTLTVDTSSNTAYMDLSSLTSEDSAVYYCAREGLYAFDYWGQGTTLTVSS

SEQ ID NO: 261 - protein, 118 aa, Mus musculus
QVQLQQSGPELVKPGASMKISCKASGYSFTGYTMNWVKQSHGKNLEWIGTINPSNGGTSYNQKFTGKATLTVDKSSTTAYMELLSLTSEDSAVYYCTRRNYGYYFDYWGQGTTLTVSS

SEQ ID NO: 262 - protein, 115 aa, Mus musculus
EVKLVESGGGLVQPGGSLRLSCVTSGFTFTDYYMSWVRQPPGKALEWLALIRNKANGYTTEYSASVKGRFTISRDNSQSILYLQMNTLRAEDSATYFCARDGGYWGQGTTLTVSS

SEQ ID NO: 263 - protein, 119 aa, Mus musculus
QITLKESGPGIVQPSQPFRLTCTFSGFSLSTSGIGVTWIRQPSGKGLEWLATIWWDDDNRYNPSLKSRLTVSKDTSNNQAFLNILTVDTADTAIYYCAQSGGITLMDYWGQGTSVTVSS

SEQ ID NO: 264 - protein, 115 aa, Mus musculus
EVNLVESGGGLVQPGGSLRLSCATSGFPFNDYYMSWVRQPPGKALEWLCLIRNKAKGYTTEYSSSVKGRFTISRDNSQSILYLQMNTLRAEDSATYYCARDGGYWGQGTTLTVSS

SEQ ID NO: 265 - protein, 116 aa, Mus musculus
QVQLQQPGAEFVKPGASVRMSCKASGYTFTSFWINWVKQRPGQGLEWIGDIYPGRGIANYNEKFNNKATLTLDTSSNTAYMQLSSLTSEDSAVYYCSRGLGYFDVWGAGTTVTVSS

SEQ ID NO: 266 - protein, 117 aa, Mus musculus
QAYLQQSGAELVRSGASVKMSCKASGYTFTSYNMHWVKQTPGQGLEWIGYIYPGNGYTNYNQKFKDKATLTADTSSSTAYMQISSLTSEDSAVYFCAREGGWAMDYWGQGTSVTVSS

SEQ ID NO: 267 - protein, 119 aa, Mus musculus
QITLKESGPGIVQPSQPFRLTCTFSGFSLSTSGIGVTWIRQPSGKGLEWLATIWWDDDNRYNPSLKSRLTVSKDTSNNQVFLNIIAVETADTAMYYCAQSGGITLMDYWGQGTSVTVSS

SEQ ID NO: 268 - protein, 117 aa, Mus musculus
QVQLQQSGAELVRPGTSVKISCKASGYTFTNFWLGWVKQRPGHGLEWVGDIFPGGGYTNYNEKFKGKATLTADTSSSTAYMQLSSLTSEDSAVYFCSRSTMLTGTYWGQGTLVTVSA

SEQ ID NO: 269 - protein, 117 aa, Mus musculus
QVQLQQSGAELVRPGTSVKISCKASGYTFTNFWLGWVKQRPGHGLEWIGDIFPGGGHTNYNEKFKGKATLTADTASSTAYMQLSSLTSEDSAVYFCSRSTILTGAYWGQGTLVTVSA

SEQ ID NO: 270 - protein, 121 aa, Mus musculus
QVQLQQSGAELVRPGTSVKVSCKASGYAFTNYLIEWVKQRPGQGLEWIGVINPGSGGNNYNEKFKGKATLTADKSSSTAYMQLSSLTSDDSAVYFCARRGDKYGSAWFAYWGQGTLVTVSA

SEQ ID NO: 271 - protein, 115 aa, Mus musculus
EVNLVESGGGLVQPGGSLRLSCATSGFTFNDYYMSWVRQPPGKALEWLGLIRDKANGYTTEYSASVKGRFTISRDNSQSILYLQMSTLRAEDSATYYCARDGGYWGQGTTLTVSS

SEQ ID NO: 272 - protein, 118 aa, Mus musculus
EVQLQQSGPELEKPGSSVKISCKASGYSFTDYNIHWVKQSNGKSLEWIGNIDVYYSSTSYNQKFKGKATLTVDKSSSTAYMQLKSLTSEDSAVYFCARSLLRWYFDVWGAGTTVTVSS

SEQ ID NO: 273 - protein, 117 aa, Mus musculus
QVQLQQPGSELVRPGASVKLSCKASGYTFTSYWMHWVKQRHGQGLEWIGNIYPGSGTTNYDEKFKNKGTLTVDTSSSTAYMHLSSLTSEDSAVYYCTREGLYPFDYWGQGTTLTVSS

SEQ ID NO: 274 - protein, 119 aa, Mus musculus
EVLLQQSGPELVKPGASVKIPCKASGYTFTDYNMDWVKQSHGKSLEWIGNINSNNGGAIYNQKFKDKATLTVDKSSSTAYMELRSLTSEDTAVYYCARGDYYGTTYDYWGQGTTLTVSS

SEQ ID NO: 275 - protein, 117 aa, Mus musculus
EVQLQQSGPELVKPGASMKISCKASGYSFTGYIMNWVKQSHGKTLEWIGLIHPYNGGTSYNQKFKGKATLTVDKSSSTAYMELLSLTSEDSAVYYCARLLRYAMDYWGQGTSVTVSS

SEQ ID NO: 276 - protein, 115 aa, Mus musculus
QVQLQQSGAELARPGASVKLSCKASGYTFISYWMQWVKQRPGQGLEWIGAIYPGDGDTRYTQKFKGKATLTADKSSSTAYMQLSSLASEDSAVYYCARGTVGDYWGQGTTLTVSS

SEQ ID NO: 277 - protein, 114 aa, Mus musculus
QIQLVQSGPELKKPGETVKISCKASGYTFTNYGMNWVKKAPGKGLKWMVWINTYTGESTYADDFKGRFAFSSETSASTAYLQINNLKNEDTATYFCARDSFAYWGQGTLVTVSA

SEQ ID NO: 278 - protein, 119 aa, Mus musculus
EVQLQQSGPELVKPGASMKISCKASGYSFTDYTMNWVKQSHGKNLEWIGLIIPYNGGTSYNQKFKGKATLTLDKSSSTAYMELLSLTSEDSAVYFCARGLRGYFAMDYWGRGTSVTVSS

SEQ ID NO: 279 - protein, 117 aa, Mus musculus
EVQLQQSGPELVKPGASMKISCKASGYSFTGYTMNWVKQSHGKNLEWIGLIFPYNGGTSYNQKFKDKATLTVDKSSSTAYMELLSLTSEDSAVYYCARSVRFSFDYWGQGTSLTVSS

SEQ ID NO: 280 - protein, 120 aa, Mus musculus
EVKLVESGGGLVKPGGSLKLSCAASGFAFSRYDMSWVRQTPEKRLEWVATISSGGSYSFYPDSVKGRFTISRDNGRNTLYLQMSSLRSEDTALYYCARQDYRYPYIMDYWGQGTSVTVSS

SEQ ID NO: 281 - protein, 118 aa, Mus musculus
EVQLQQSGPELVKPGASMKISCKASGYSFTGYTMNWVKQSHGKNLEWIGLINPYNGGTSHNQKFKGKATLTVDKSSSTAYMELLSLTSEDSAVYYCARFRLWQGMDYWGQGTSVTVSS

SEQ ID NO: 282 - protein, 117 aa, Mus musculus
QVQLQQPGSELVRPGASVKLSCKASGYTFTSYWMHWVKQRHGQGLEWIGNIFPGSDTTNYDEKFKSKVTLTVDTSSSTVYMHLSSLTSEDSAVYYCTREGLYAFDYWGQGTTLTVSS

SEQ ID NO: 283 - protein, 117 aa, Mus musculus
QVQLQQPGSELVRPGASVKLSCKASGYTFTSYWMHWVKQRHGQGLEWIGNIFPGSGTTNYDEKFKNKGTLTVDTSSNTAYMHLSSLTSEDSAVYYCAREGLYAFDYWGQGTTLTVSS

SEQ ID NO: 284 - protein, 117 aa, Mus musculus
QVQLQQPGSELLRPGASVKLSCKASGYTFTSYWMHWVKQRHGQGLEWIGNIFPHSGITNYDERFKNKVTLTVDTSSSTAYMHLSSLTSEDSAVYYCAREGLYAFDYWGQGTTLTVSS

SEQ ID NO: 285 - protein, 121 aa, Mus musculus
EVMLVESGGGLVKPGGSLKLSCAASGFTFSTYAMSWVRQTPEKRLEWVATISSGGTYTYYPDSVKGRFTISRDNAKNTLYLQMSSLRSEDTAMYYCARHFISTIITHFDYWGHGTTLTVSS

SEQ ID NO: 286 - protein, 117 aa, Mus musculus
EVQLQQSGTVLARPGASVKMSCKASGYSFTSYWMHWVKQRPGQGLEWIGAIYPGNNATRYNQKFMGKAKLTAVTSASTAYMEISSLTNEDSSVYYCSREGGFGMDYWGQGTSVTVSS

SEQ ID NO: 287 - protein, 119 aa, Mus musculus
EVQLQQSGPELVKPGASMKISCKASGYSFTDYIMNWVKQSHGKNLEWIGLIIPYNGGTSYNQKFKGKATLTVDKSSSTAYMDLLSLTSEDSAVYYCARGLRGYYTMDYWGHGTSVTVSS

SEQ ID NO: 288 - protein, 116 aa, Mus musculus
QVQLQQPGAELVKPGASVKMSCKASGYTFTTFWINWVKQRPGQGLEWIGDIFPGRGITNYNGKFNNKATLTLDTSSSTAYMQLSSLTSEDSAVYYCSRGLGYFDVWGAGTTVTVSS

SEQ ID NO: 289 - protein, 120 aa, Mus musculus
QVQLQQSGGEVMKPGASVKISCKATGYTFSNYWIEWVKQRPGHGLEWIGEILPGSGSAYYNEKFRGKATFTADKSSNTAYMQLSSLTSDDSAVYYCARQKYGNYYYFDYWGQGTTLTVSS

SEQ ID NO: 290 - protein, 119 aa, Mus musculus
QITLKESGPGLVQPSQPFRLTCTFSGFSLSTSGIGVTWIRQPSGKGLEWLATIWWDDDSRYNPSLKSRLTVSKDTSNNQAFLNIITVETADTAIYYCAQSGGITLMDYWGQGTSVTVSS

SEQ ID NO: 291 - protein, 119 aa, Mus musculus
EVQLQQSGPELVKPGASLKISCKASGYSFTGYTMNWVKQSHGKNLEWIGLIFPYNGATSYNQKFQGKATLTVDKSSNTTYMELLSLTSEDSAVYYCARGLRGYFAMDYWGQGTSVTVSS

SEQ ID NO: 292 - protein, 117 aa, Mus musculus
QVQLQQPGSELVRPGASVKLSCKASGYTFTSYWMHWVRQRHGQGLEWIGNIFPGSGTTNYDEKFKNRGTLTVDTSSSTANMHLSSLTSEDSAVYYCTREGLYPFDYWGQGTTLTVSS

SEQ ID NO: 293 - protein, 117 aa, Mus musculus
QVQLQQPGSELVRPGASVKLSCKASGYTFTSYWMHWVKQRHGQGLEWIGNIFPGTGSANYDERFKNKGTLTVDTSSSTAYMHLSSLTYEDSAVYYCTREGLSPFDYWGQGTTLTVSS

SEQ ID NO: 294 - protein, 116 aa, Mus musculus
QAYLQQSGAELVRSGASVKMSCKASGYTFTSYSMHWVKQTPGQGLEWIGCIYPGNVITNYNQKFKGKATLTADTSSSTAYMQISSLTSEDSAVYFCARDGGFGTYWGQGTLVTVSA

SEQ ID NO: 295 - protein, 117 aa, Mus musculus
QAYLQQSGAELVRSGASVKMSCKASGYTFTSYNLHWVKQTPGQGLEWIGYIYPGNGYTNYNQKIKGKATLTADTSSSTAYMQISSLTSEDSAVYFCAREGGWAMDYWGQGTSVTVSS

SEQ ID NO: 296 - protein, 119 aa, Mus musculus
EVQLQQSGPELVKPGASLKISCKASGYSFTGYTMNWVKQSHGKNLEWIGLIFPYNGATSYNQKFQGKATLTVDKSSNTTYMELLSLTSEDSAVYYCTRGLRGYFALDYWGQGTSVTVSS

SEQ ID NO: 297 - protein, 117 aa, Mus musculus
QAYLQQSGAELVRSGASVKMSCKASGYTFTSYNMHWVKQTPGQGLEWIGYIYPGNGGTNYNQKFKGKATLTADTSSNTAYMQISSLTSEDSAVYFCARDGFYPFDYWGQGTTLTVSS

SEQ ID NO: 298 - protein, 117 aa, Mus musculus
QAYLQQSGAELVRSGASVKMSCKASGYTFTSYNLHWIKQTPGQGLKWIGYIYPGNGYTNYNQKFKGKATLTADTSSSTAYMQINSLTSEDSAVYFCAREGGWAMDYWGQGTSVTVSS

SEQ ID NO: 299 - protein, 114 aa, Mus musculus
QIQLVQSGPELQKPGETVKISCRASGYTFTNYGMNWVKKAPGKGLKWMGWINTYTGESAYADDFKGRFAFSSETSASTAYLQINNVKNDDTATYFCARDSFAHWGQGTLVTVSA

SEQ ID NO: 300 - protein, 119 aa, Mus musculus
EVQLQQSGPELVKPGVSMKISCKASGYSFTGYTMNWVKQSHGKNLEWLGLIFPYNSATSYNQKFTGKATITVDKSSNTTYMELFSLTSEDSAVYYCARGLRGFFALDYWGQGTSVTVSS

SEQ ID NO: 301 - protein, 117 aa, Mus musculus
EVQLQQSGTVLARPGASVKMSCKASGYSITSYWMHWVKQRPGQGLEWIGGIYPGNSNTNYNQKFKGKAKLTAVTSASTANMELSSLTNEDSAVYYCTREGGYGMDYWGQGTSVTVSS

SEQ ID NO: 302 - protein, 120 aa, Mus musculus
QVQLQQSGGEVMKPGASVKISCKATGYTFSNYWIEWVKQRPGHGLEWIGEILPVSDSAYYNERCRCKATFTADESSTTAYMHLSGVASEDSAVYYCARQKYGTYYYFDYWGQGTTLTVSS

SEQ ID NO: 303 - protein, 117 aa, Mus musculus
QVQLQQSGVELVRPGTSVKISCKASGYTFTNFWLSWVKQRPGHGLEWIGDIFPGGDYTNYNEKFKGKATLTADTSSSTAYIQLSSLTSEDSAVYFCSRSTIISGAYWGQGTLVTVSE

SEQ ID NO: 304 - protein, 117 aa, Mus musculus
QVQLQQPGSELVRPGASVKLSCKASGYTFTSYWMHWVKQRHGQGLEWIGNIYPGSGTTNYDEKFKSKVTLTVDTSSSTAYMHLSSLTSEDSAVYFCTREGLYAFDYWGQGTTLTVSS

SEQ ID NO: 305 - protein, 117 aa, Mus musculus
EVQLQQSGPELVKPGASMKISCKASGYSFTGYIMNWVRQSHGKSLEWIGLINPYNGGTSYNQKFKGKATLTVDKSSSTAYMELLSLTSEDSAVYYCTRLLRFAMDYWGQGTSVTVSS

SEQ ID NO: 306 - protein, 120 aa, Mus musculus
EVNLVESGGGLVKPGGSLKLSCAASGFVFSSYDMSWVRQTPEKRLEWVATISSGGSYTYYPDSVKGRFTISRDNARNTLYLQMSSLRSEDTALYYCARQDYRYPYTMDYWGQGTSVTVSS

SEQ ID NO: 307 - protein, 115 aa, Mus musculus
EVNLVESGGGLVQPGGSLRLSCSTSGFPFNDYYMSWVRQPPGKALEWLCLIRNKANGYTTEYSSSVKGRFTISRDNSQSILYLQMNTLRAEDSATYYCARDGGYWGQGTTLTVSS

SEQ ID NO: 308 - protein, 117 aa, Mus musculus
EFQLQQSGTVLARPGASVKMFCKASGYSFTRYWMHWVKQRPGQGLEWIGAFYPGNSATNYNQKFKGKAKLTAVTSASTAYMELNSLTNEDSAVYYCSREGGYGMDHWGQGASVTVSS

SEQ ID NO: 309 - protein, 121 aa, Mus musculus
QVQLQQSGPEVVRPGVSVKISCKGSGYTFTDYAMHWVKQSHAKSLEWIGVIGTSNGNTNYNQKFRGKATMAVDKSSSTAYMELARLTSEDSAIYYCTRDYYGRSYLYFDYWGQGTTLTVSS

SEQ ID NO: 310 - protein, 117 aa, Mus musculus
EVQLQQSGPELVKPGASMKISCKASGYSFTGYTMNWVKQSHGKNLEWIGLIFPYNGGTSYNQRFMGKATLTVDKSSNTAYMELLSLTSEDSAVYYCARSRSFAMDYWGQGTSVTVSS

SEQ ID NO: 311 - protein, 115 aa, Mus musculus
EVKLVESGGGLVQPGGSLRLSCATSGFTFSDYYMSWVRQPPGKALEWLALIRNKANGYTTEYSVSVKGRFTISRDNSQSILYLQMNTLRAEDSATYYCARDGGYWGQGILVTVSS

SEQ ID NO: 312 - protein, 119 aa, Mus musculus
QIQLVQSGPELKKPGETVKISCKASGYTFTDHSMHWVRQAPGQVLKWMGWINTETGEPTYVDDFKGRFAFSLEASASTAYLQINNLKNEDTATYFCASPRNYDGAMDYWGQGISVTVSS

SEQ ID NO: 313 - protein, 115 aa, Mus musculus
EVKLVESGGGLVQPGGSLRLSCATSGFTFTSYYMSWVRQPPGKALEWLALIRDKANGYTTEYSVSVKGRFTISRDNSQSILYLQMNTLRAEDSATYYCARDGGYWGQGTLVTVSA

SEQ ID NO: 314 - protein, 116 aa, Mus musculus
QVQLQQSGPELVKPGASVKISCKASGYAFSSSWMNWVKQRPGQGLEWIGRIYPGDGDTYYSGKFKDKATLTADKSSSTAYMQLSSLTSVDSAVYFCASNYYYFDYWGQGTTLTVSS

SEQ ID NO: 315 - protein, 118 aa, Mus musculus
QVQLQQSGAELAKPGASVKMSCKASGYTFTNYWMHWVKQRPGQGLEWIGYTNPSTGSSDYNQKFKDKATLTADKSSSTAYMQLSSLTSEDSAVYYCAAYYRYGDGAYWGQGTQVTVSA

SEQ ID NO: 316 - protein, 119 aa, Mus musculus
EVMLVESGGGLVKPGGSLRLSCAASGFTFSTYVMSWVRQTPEKRLEWVATISSGGSYIHYPDSVQGRFTISRDNAKNTLYLQMSSLRSEDTAMYFCARWLLGLYAMDYWGQGTSVTVSS

SEQ ID NO: 317 - protein, 117 aa, Mus musculus
QVQLQQSGAELVRPGSSLKISCKASGYAFSSYWMNWVKQRPGQGLEWIGQIYPGDGDSDYNGKFKVKATLTADKSSSTAYMQLSSLTSEDSAVYFCARRKDYGYDYWGQGTTLTVSS

SEQ ID NO: 318 - protein, 121 aa, Mus musculus
EVKLVESGGGLVQPGGSLRLSCATSGFTFSEFYMEWVRQPPGKRLEWIAASRNKANDYSTDYSASVKGRFIVSRDTSQNILYLQMTALRADDTAIYYCARDAYGYPWFVYWGQGTLVTVSA

SEQ ID NO: 319 - protein, 120 aa, Mus musculus
DVQLVESGGGLVQPGGSRKLSCAASGFTFSNFGMDWVRQAPEKGLEWIAYISSGSSTIYYADTVKGRFTISRDNPKNTLFLQMTSLRSEDTAMYFCARGRYDYLYAMDYWGQGTSVTVSS

SEQ ID NO: 320 - protein, 115 aa, Mus musculus
EVKLVESGGGLVQPGGSLRLSCATSGFTFTDYYMSWVRQPPGKALEWLALITNKANGYTTDYSVSVKGRFTISRDNSQSILYLQMNTLRAEDSATYYCARDGGYWGQGTLVTVSA

SEQ ID NO: 321 - protein, 118 aa, Mus musculus
EVKLEKSRGGLVKPGGSMKLSCVASGFTFSNFWMNWVRQSPEKGLEWVAQIRLNSDNYATHYAESVKGRFTISRDDSKSSVYLQMNSLGAEDTGIYYCHGNFYDLDYWGQGTSVTVSS

SEQ ID NO: 322 - protein, 119 aa, Mus musculus
EVQLQQSGPELVKPGASMKISCKASGFSFTAYTMNWVKQSQGDNLEWIGLIVPYNGGTSYNLKFKGKATLTVDKSSSTAYMELLSLTSEDSAVYYCARGLQRFFAMDFWGQGTSVTVSS

SEQ ID NO: 323 - protein, 117 aa, Mus musculus
EVQLQQSGPELVKPGASMKMSCKASGYSFTTYTMSWVKQSHGKNLEWIGLINPYNGGTSYNQKFKGKATLTVDKSSSTAYMELLSLTSEDSAVYYCARSRSFAMDYWGQGTSVTVSS

SEQ ID NO: 324 - protein, 119 aa, Mus musculus
EVQLQQSGPELVKPGASMKISCKASGYSFTGYTMNWVRQSHGKDLEWIGLIIPYNGGTSYNQKFKGKATITVDKASSTAYMDLLSLTSEDSAVYYCARGLRGYFAMDYWGQGTSVTVSS

SEQ ID NO: 325 - protein, 116 aa, Mus musculus
EVQLQQSGPELVKPGASVKISCKASGYTFTDYNMHWVKQSHGKSLEWIGYIYPYNGGTGYNQKFKSKAPLTVDTSSSTAYMELRSLTSEDSAVYYCARYYGYFDYWGQGTTLTVSS

SEQ ID NO: 326 - protein, 119 aa, Mus musculus
EVQLQQSGPELVKPGASMKISCKASGYSFTGYIMNWVKQSHGDNLEWIGLIVPYNGGTSYNLKFKGKATLTVDKSSSTAYMELLSLTSEDSAVYYCARGLQRFYAMDYWGQGTSVTVSS

SEQ ID NO: 327 - protein, 118 aa, Mus musculus
EVKLEKSRGGLVQPGGSMKISCVASGFTFSNFWMNWVRHSPEKGLEWVAQIRLNSDNYATHYAESVKGRFTISRDDSKRSVYLQMNSLGAEDTGIYYCHGNFYTLDYWGQGISVTVSS

SEQ ID NO: 328 - protein, 118 aa, Mus musculus
QVQLQQSGAELAKPGASVKMSCKASGYTFTNYWMHWVKQRPGQGLEWIGYTNPSTGYSDYNQKFKDKATLTADKSSSTAYMQLSSLTSEDSAVYYCAAYYRYGDGAYWGQGTQVTVSA

SEQ ID NO: 329 - protein, 120 aa, Mus musculus
DVQLVESGGGLVQPGGSRKLSCAASGFTFSSFGMDWVRQAPEKGLEWIAYISSGSSTIYYADTVKGRFTISRDNPKNTLFLQMTSLRSEDTAMYYCARGRFDYLYAMDYWGQGTSVTVSS

SEQ ID NO: 330 - protein, 117 aa, Mus musculus
EVQLQQSGPELVKPGASMKISCKASGYSFTGYTMNWVKQSHGKNLEWIGLINPYNGGTSYNQKFKGKATFTVDKSSSTAYMELLSLTSEDSAVYYCARGLRFSLEYWGQGTTLTVSS

SEQ ID NO: 331 - protein, 117 aa, Mus musculus
EVQLQQSGPELVKPGASVKISCKASGYSFTGYIMNWVKQSHGKNLEWIGLIIPYNGGTSYNQKFRGKATLTVDKSSSTAYMDLLSLTSDDSAVYYCARGLSYRYDYWGQGTTLTVSS

SEQ ID NO: 332 - protein, 119 aa, Mus musculus
EVQLQQSGPELVKPGVSMKISCKASGYSFTGYTMNWVRQSHGKDLEWIGLIIPYNGGTSYNQKFKGKATITVDKASSTAYMDLLSLTSEDSAVYYCARGLRGYFAMDYWGQGTSVTVSS

SEQ ID NO: 333 - protein, 117 aa, Mus musculus
EVQLQQSGPELVKPGASMKISCKASGYSFTGYIMNWVKQSHGKNLDWIGLIYPYNGGTSYNQKFKGRATLTVDKSSSTAYMELLSLTSEDSAVYYCARLISYAMDYWGQGTSVTVSS

SEQ ID NO: 334 - protein, 119 aa, Mus musculus
QIQLVQSGPELKKPGETVKISCKASGYTFTDHSMHWVKQAPGKGLKWMGWINTETGEPTYVDDFKGRFAFSLETSASTAYLQINNLKNEDTAAYFCASPRNYDGAMDYWGQGTSVTVSS

SEQ ID NO: 335 - protein, 118 aa, Mus musculus
QVQLQQSGAELAKPGASVKMSCKASGYTFTNYWMHWVKQRPGQGLEWIGYTNPSTGYSEYNQKFKDKATLTADKSSSTAYMQLSSLTSEDSAVYYCAAYYRYGDGAYWGQGTQVTVSA

SEQ ID NO: 336 - protein, 120 aa, Mus musculus
QVQLQQSGTELVRPGTSVKVSCKASGYAFTDYLIEWVKQRPGQGLEWIGVINPGSGGAIYNEKFKGKVTLTADKSSSTAYMQLSSLTSDDSAVYFCARYHYYGSGLFPYWGQGTLVTVSA

SEQ ID NO: 337 - protein, 113 aa, Mus musculus
EVQLQQSGPELVKPGASVKMSCKASGYTFTSYVMHWVKQKPGQGLEWIGYINPYNDGTQYNEKFRGKATLTSDKSSSTAYMELSSLTSEDSAVYYCAREIDYWGQGTTVTVSS

SEQ ID NO: 338 - protein, 115 aa, Mus musculus
EVKLVESGGGLVQPGGSLRLSCATSGFTFSDYYMSWVRQPPGKALEWLALIRNKANCYTTDYSVSVKGRFTISRDNSQSILYLQMNTLRAEDSATYYCARDGGYWGQGILVTVSS

SEQ ID NO: 339 - protein, 115 aa, Mus musculus
QIQLVQSGPELKKPGETVKISCKASGYTFTNYGMNWVKQAPGKGLKWMGWINTYTGEPTYADDFKGRFAFSLETSASTAYLQINNLKNEDTATYFCARYEYFDYWGQGTTLTVSS

SEQ ID NO: 340 - protein, 118 aa, Mus musculus
DVQLQESGPGLVKPSQSLSLTCTVTGYSITSDYAWNWIRQFPGNKLDWMGYITYSGDTRYNPSLKSRISITRDTSKNQFFLRLNSVTTEDTATYYCARRELGQGFTYWGQGTLVTVSA

SEQ ID NO: 341 - protein, 116 aa, Mus musculus
QVQLQQSGAELARPGASVTLSCKASGYTFTYYEIHWVKQTPVHGLEWIGPIDPETGGTAYNQKFKGKATLTADKSSSTAYMELRSLTSEDSAVYFCTRWGYKFAYWGQGTLVTVSA

SEQ ID NO: 342 - protein, 120 aa, Mus musculus
QVQLQQSGAELVRPGTSVKVSCKASGYDFTDYLIEWVKQRPGQGLEWIGVINPGSGGTKYNEKFKGKATLTADKSSSTAYMQLSSLTSDDSAVYFCARYHYYGSNLFPYWGQGTLVTVSA

SEQ ID NO: 343 - protein, 117 aa, Mus musculus
EVQLQQSGPELVKPGASMKMSCKASGYSFTTYTMSWVKQSHGKNLEWIGLINPYNGGTSYNQKFKGKATLTFDKSSSTAYMELLSLTSEDSAVYYCARSRTFAMDYWGQGTSVTVSS

SEQ ID NO: 344 - protein, 119 aa, Mus musculus
DVQLVESGGGLVKPGGSLKLSCAASGFTFSSYTMSWVRQTPEKRLEWVATISGGGSYTYYPDSVKGRFTISRDNAKNTLNLQKSSLKSEDTAMYYCTRWLQSLYAMDYWGQGTSVTVSS

SEQ ID NO: 345 - protein, 118 aa, Mus musculus
EVQLQQSGPELVKPGASMKISCKASGYSFTGYTMNWVKQSHGKNLEWIGLINPYNGGTSYNQKFKGKATLTVDKSSSTAYMELLSLTSEDSAVYYCASGGLRYGFAYWGQGTTLTVSS

SEQ ID NO: 346 - protein, 119 aa, Mus musculus
EVQLVETGGGLVQPKGSLNLSCAASGFTFNTNAMNWVRQAPGKGLEWVARIRSKSNNYATYYADSVKDRFTISRDDSQSMLYLQMNNLKTEDTAMYYCVGSTMTIFSYWGQGTLVTVSA

SEQ ID NO: 347 - protein, 120 aa, Mus musculus
QVQLKESGPGLVAPSQSLSITCTVSGFSLTSYGVHWVRQPPGKGLEWLGVIWADGSTNYNSALMSRLSINKDNSKSQVFLKMNSLQTDDTAMYYCARDLGYLTTAWFAYWGQGTLVTVSA

SEQ ID NO: 348 - protein, 117 aa, Mus musculus
EVQLQQSGPELVKPGVSMKMSCKASGYSFTAYTMSWVKQSHGKSLEWIGLINPYNGGISYNQKFKDKATLTVDKSSTTAYMELLSLTSEDSAVYYCARSRTFAMDYWGQGTSVTVSS

SEQ ID NO: 349 - protein, 119 aa, Mus musculus
EVQLQQSGPELVKPGASMKISCKASGYSFTDYIMNWVKQSHGDNLEWIGLIVPYNGGTSYNLNFKGKASLTVDKSSSTAYMELLSLTSEDSAVYYCARGLQRFYAMDYWGQGTSVTVSS

SEQ ID NO: 350 - protein, 118 aa, Mus musculus
QVHLQQSGAELAKPGASVKMSCKASGYTFTNYWMHWVKQRPGQGLEWIGYTNPSTGSSDYNQKFKDKATLTADKSSSTAYMQLSSLTSEDSAVYYCAAYYRYGDGAYWGQGTQVTVSA

SEQ ID NO: 351 - protein, 118 aa, Mus musculus
EVQLQQSGPELVKPGASMKISCKASGFSFPGYTMNWVKQSHGKNLEWIGLINPYNGATSYNQKFKGKATLTVDKSSNTAYMDLLSLTSEDSAVYYCTRGTLITGFAYWGQGTLVTVSA

SEQ ID NO: 352 - protein, 118 aa, Mus musculus
EVQLQQSGPELVKPGASMKISCKASGFSFTGYTMNWVKQSHGKNLEWIGLINPYNGATSYNQKFKGKATLTVDKSSSTAYMELLSLTSEDSAVYYCARGTLITGFAYWGQGTLVTVSA

SEQ ID NO: 353 - protein, 117 aa, Mus musculus
EVQLQQSGPELVKPGASMKISCKASGYSFTGYIMSWVKQSHGKNLEWIGLINPYNGGTSYNQKFKGKATLTIDKSSSTAYMELLSLTSEDSAVYYCARSRSFAMDYWGQGTSVTVSS

SEQ ID NO: 354 - protein, 117 aa, Mus musculus
EVQLQQSGPELVKPGTSMKISCKASGYSFTGYTMNWVKQSHGKNLEWIGLIVPYNGGTSYNQKFKGKATLTVDKSSSTAYMELLSLTSEDSAVYYCARGLSFRYDYWGQGTTLTVSS

SEQ ID NO: 355 - protein, 119 aa, Mus musculus
EVQLQQSGPELVKPGASMKISCKASGYSFTGYIMNWVKQSHGKNLEWIGLIFPYNGGTSYNQKFKGKATLTVDKSSSTAYMELLSLTSEDSAVYYCARGLPRFYAMDYWGQGTSVTVSS

SEQ ID NO: 356 - protein, 118 aa, Mus musculus
QVQLKESGPGLVAPSQSLSITCTVSGFSLTSYGVHWVRQPPGKGLEWLGVIWAGGTTNYNSALMSRLSISKDNSKSQVFLKMNSLQTDDTALYYCARFPSYRESMDYWGQGTSVTVSS

SEQ ID NO: 357 - protein, 119 aa, Mus musculus
DVKLVESGGGLVKPGGSLKLSCSASGFTFSSYTMSWVRQTPEKRLEWVATISSGGSYTYYPDSVKGRFTISRDNAKNTLYLQMSSLKSEDTAMFYCTRWLLSLYAMDYWGQGTSVTVSS

SEQ ID NO: 358 - protein, 117 aa, Mus musculus
EVQLQQSGPELVKPGASMKISCKASGYSFTGYIMNWVKQSHGKNLEWIGLIYPYNGGTSYNQKFKGRATLTVDKSSSTAYMELLSLTSEDSAVYYCARLISYAMDYWGQGTSVTVSS

SEQ ID NO: 359 - protein, 117 aa, Mus musculus
EVQLQQSGPELVKPGASMKISCKASGYSFTGYTMNWVKQSHGKNLEWIGLINPYNGATSYNQKFKGKATFTVDKSSSTAYMELLSLTSEDSAVYYCARGLRFSLEYWGQGTTLTVSS

SEQ ID NO: 360 - protein, 115 aa, Mus musculus
EVQLQQSGAELVKPGASVKLSCTASGFNIKDTYMHWVKQRPEQGLEWIGRIDPANGNIKFDPKFQGKATITADTSSNTAYLQLRSLTSADTAVYFCARSLPGAYWGQGTLVTVSA

SEQ ID NO: 361 - protein, 115 aa, Mus musculus
EVKLVESGGGLVQPGGSLILSCATSGFTFTNYYMSWVRQPPGKALEWLGFIRNRPYGYTTEYNASVKGRFTISRDNSQSILYLQMNTLAPEDSATYYCAAGLDYWGQGTTLTVSS

SEQ ID NO: 362 - protein, 120 aa, Mus musculus
QVQLQQSGAELVRPGTSVKVSCKASGYAFSDYLIEWVKQRPGQGLEWIGVINPGSGGTNYNEKFKDKATLTADKSSSIAYMQLSSLTSDDSAVYFCARFHYYGSSLFPYWGPGTLVTVSA

SEQ ID NO: 363 - protein, 119 aa, Mus musculus
EVQLQQSGPELVKPGASMKISCKASGYSFTGYTMNWVKQSHGDNLEWIGLIVPYNGGTSYNLKFKGKATLTVDKSSSTAYMELLSLTSEDSAVYYCARGLQRFYAMDYWGQGTSVTVSS

SEQ ID NO: 364 - protein, 115 aa, Mus musculus
EVKLVESGGGLVQPGGSLRLSCATSGFTFTDYYMSWVRQPPGKALEWLALIRNKANGYTTEYSVSVKGRFTISRDNSQSILYLQMNTLRAEDSATYYCARDGGYWGQGTLVTVSA

SEQ ID NO: 365 - protein, 116 aa, Mus musculus
QVQLKQSGAELVRPGASVKLSCKTSGYIFTSYWIHWVKQRSGQGLEWIARIYPGIGSTDYNEKFKGKATLTADKSSSTAYMQLSSLKSEDSAVYFCEVPIGTVDYWGQGTTLTVSS

SEQ ID NO: 366 - protein, 121 aa, Mus musculus
QVTLKESGPGILQPSQTLSLTCSFSGFSLSTSGMGVGWIRQPSGKGLEWLAHIWWDDVKRYNPALKSRLTISKDASSSQVFLKIASVDTADTATYYCARLGVYYRYDGDYWGQGTTLTVSS

SEQ ID NO: 367 - protein, 115 aa, Mus musculus
EVKLVESGGGLVQPGGSLRLSCATSGFTFIDYYMSWVRQPPGKALEWLALIRNKANGYTTEYSVSVKGRFTISRDNSQSILYLQMNTLRAEDSATYYCARDGGYWGQGTLVTVSA

SEQ ID NO: 368 - protein, 116 aa, Mus musculus
QVQLKESGPGLVAPAQSLSITCTVSGFLITAYGVNWVRQPPGKGLEWLGMIWGDGSTDYNSALKSRLSISKDSSKSQVFLKMNSLQTDDTARYYCARYDYYGMDYWGQGTSVTVSS

SEQ ID NO: 369 - protein, 115 aa, Mus musculus
EVNLVESGGGLVQPGGSRRLSCATSGFTFTNYYMTWVRQPPGKALEWLGFIRNKPYGYTTEYNESVKGRFTISRDNSQSILYLQMNTLRAEDSATYYCAAGLDYWGQGTTLTVSS

SEQ ID NO: 370 - protein, 120 aa, Mus musculus
EVMLVESGGGLVKPGGSLKLSCAASGFTFSNYAMSWVRQTPEKRLDWVATISSGGIYTYYPDNVKGRFSISRDNAKNTLYLQLSSLRSEDTAMYYCARQRTTATDYFDYWGQGTTLTVSS

SEQ ID NO: 371 - protein, 116 aa, Mus musculus
QVQLKQSGAELVRPGASVKLSCKTSGYIFTSYWIHWVKQRSGQGLEWIARIYPGTGGTSYNEKFKGKATLTADKSSTTAYMQLSSLKSEDSAVYFCEVPIGTVDYWGQGTTLTVSS

SEQ ID NO: 372 - protein, 115 aa, Mus musculus
EVKLVESGGGLVQPGGSLRLSCATSGFTFTNYYMSWVRQPPGKALEWLGFIRNKPYGYTTEYSASVKGRFTISRDNSQSILYLQMNTLTAEDSATYYCAAGLDYWGQGTTLTVSS

SEQ ID NO: 373 - protein, 116 aa, Mus musculus
QVQLKQSGAELVRPGASVKLSCKTSGYIFTSYWIHWVKQRSGQGLEWIARIYPGTGSTYYNEKFKGKATLTADKSSSTAYMQLSSLKSEDSAVYFCEVPVGTFDYWGQGTTLTVSS

SEQ ID NO: 374 - protein, 118 aa, Mus musculus
DVQLQESGPGLVKPSQSLSLTCTVTGYSITSDYAWNWIRQFPGNKLDWMGYITYSGDTRYNPSLKSRISITRDTSKNQFFLRLNSVTTEDTATYYCARREVGQGFTYWGQGTLVTVSA

SEQ ID NO: 375 - protein, 120 aa, Mus musculus
QVQLKESGPGLVAPSQSLSITCTVSGFSLTSFGVHWVRQPPGKGLEWLGVIWADGGTNYNSALMSRLSISKDNSKSQVFLKMNSLQTDDTAMYYCARDLGYLTTAWFAYWGQGTLVTVSA

SEQ ID NO: 376 - protein, 119 aa, Mus musculus
EVQLQQSGPELVKPGASMKISCKASGYSFTGYIMNWVKQSHGKNLEWIGLIIPYNGGTSYNQKFKGKATLTVDKSSSTAYMELLSLTSEDSAVYYCTRGLQRFYAMDYWGQGTSVTVSS

SEQ ID NO: 377 - protein, 118 aa, Mus musculus
DVQLQESGPGLVKPSQSLSLTCTVTGYSITSDYAWNWIRQFPGNKLEWMGYIVYSGSTNYNPSLKSRISITRDTSKNHFFLQLNSVTAEDTATYYCARRQVGLGFAYWGQGTLVTVSA

SEQ ID NO: 378 - protein, 117 aa, Mus musculus
EVQLQQSGPELVKPGASMKISCKASGYSFTGYTMSWVKQSHGKNLEWIGLIIPYTGGTSYSQKFKGKATLTVDKSSTTAYMELLSLTSEDSAVYYCARSRTFAMDYWGQGTSVTVSS

SEQ ID NO: 379 - protein, 117 aa, Mus musculus
EVKLEESGGGLVQPGGSMKLSCVASGFTFSQFWMNWVRQSPEKGLEWVAEIRLKSNSYKTQYAESVKGRFTISRDDSKSSVYLQMNNLRAEDTGIYYCTRLPIFDYWGQGTTLTVSS

SEQ ID NO: 380 - protein, 113 aa, Mus musculus
DIVLTQSPSSLSVAAGEKVTLSCKSSQSLLNSGIQKNYLAWYQQKPGQPPKLLIYGASTRESGVPDRFTGSGSGTDFTLTISSVQAEDLAVYYCQNDHRYPFTFGGGTKLEIK

SEQ ID NO: 381 - protein, 112 aa, Mus musculus
DVVMTQTPLTLSVTIGQPASISCKSSQSLLDSDGKTYLNWLLQRPGQSPKRLIYLVSKLDSGVPDRFTGSGSGTDFTLKISRVEAEDLGVYYCWQGTHFPYTFGGGTKLEIK

SEQ ID NO: 382 - protein, 112 aa, Mus musculus
DVVMTQTPLTLSVAIGQPASISCKSSQSLLDSDGKTYLNWLLQRPGQSPKRLIYLVSKLDSGVPNRFTGSGSGTDFTLKISRVEAEDLGVYYCWQGTHFPYTFGGGTKLEIK

SEQ ID NO: 383 - protein, 106 aa, Mus musculus
DIKMTQSPSSIYAYLGERVTITCKASQDINSYLSWFQQKPGKSPKTLIYRANRLLDGVPSRFSGSGSGQDYSLTISSLEYEDMGIYYCLQYDELYTFGGGTKLEIK

SEQ ID NO: 384 - protein, 112 aa, Mus musculus
DVVMTQTPLTLSVTFGQPASISCKSSQSLLDSDGKTYLNWLLQRPGQSPKRLIYLVSKLDSGVPDRFTGSGSGTDFTLKISRVEAEDLGVYYCWQGTHFPWTFGGGTKLEIK

SEQ ID NO: 385 - protein, 112 aa, Mus musculus
DVVMTQTPLTLSVTIGQPASISCKSSQSLLDSDGKTYLNWLLQRPGQSPKRLIYLVSKLDSGVPNRFTGSGSGTDFTLKISRVEAEDLGVYYCWQGTHFPYTFGGGTKLEIK

SEQ ID NO: 386 - protein, 107 aa, Mus musculus
DIQMTQSSSSFSVSLGDRVTITCKASEDIYNRLAWYQQKPGNAPRLLISGATSLETGVPSRFSGSGSGKDYTLSIISLQTEDVGTYYCQQYWSTPWTFGGGTKLEIK

SEQ ID NO: 387 - protein, 112 aa, Mus musculus
DVVMTQTPLSLSITIGQPASISCKSSQSLLDSDGKTYLNWLLQRPGQSPKRLIYLLSKLDSGVPDRFTGSGSGTDFTLKISRVEAEDLGVYYCWQGTHFPYTFGGGTKLEIK

SEQ ID NO: 388 - protein, 112 aa, Mus musculus
NIMMTQSPSSLAVSAGEKVTMSCKSSQSVLYSSNQKNYLAWYQQKPGQSPKLLIYWASTRESGVPDRFTGSGSGTDFTLTISSVQAEDLAVYYCHQYLSSYTFGGGTKLEIK

SEQ ID NO: 389 - protein, 112 aa, Mus musculus
DVVMTQTPLTLSVTIGQPASISCKSGQSLLDSDGKTYLNWLLQRPGQSPKRLIYLVSKLDSGVPDRFTGSGSGTDFTLKISRVEAEDLGVYYCWQGTHFPYTFGGGTKLEIK

SEQ ID NO: 390 - protein, 106 aa, Mus musculus
DIQMTQSPSSLSASLGGKVTITCKASQDINKYIAWYQHKPGKGPRLLIRYTSTLQPGIPSRFSGSGSGRDYSFSISNLEPEDIATYYCLQYDNLWTFGGGTKLEIK

SEQ ID NO: 391 - protein, 112 aa, Mus musculus
DVVMTQTPLTLSVTIGHPASISCKSSQSLFDSDGKTYLNWLLQRPGQSPKRLIYLVSKLDSGVPDRFTGSGSGTDFTLKISRVEAEDLGVYYCWQGTHFPYTFGGGTKLEIK

SEQ ID NO: 392 - protein, 112 aa, Mus musculus
DVVMTQTPLTLSVTIGQPASISCKSSQSLLDSDGKTYLNWLLQRPGQSPKRLIYLVSKLDSGVPDRFTGSGSGTDFTLKISRVEAEDLGVYYCWQGTHFPYTFGGGTRLEIK

SEQ ID NO: 393 - protein, 112 aa, Mus musculus
DVVMTQTPLTLSVTIGHPASISCKSTQSLLDIDGKTYLNWLLQRPGQSPKRLIYLVSKLDSGVPDRFTGSGSGTDFTLKISRVEAEDLGVYYCWQGTHFPYTFGGGTKLEIK

SEQ ID NO: 394 - protein, 111 aa, Mus musculus
DVVMTQTPLSLPVSLGDQASFSCRSSQSLVHSNGNTYLHWYLQKPGQSPKLLIYKISNRFSGVPDRFSGSGSGTDFTLKISRVEAEDLGVYFCSQSTHVPAFGGGTKLEIK

SEQ ID NO: 395 - protein, 112 aa, Mus musculus
DVVMTQTPLTLSVTIGQPASISCKSSQSLLDSDGKTYLNWLLQRPGQSPKRLIYLVSKLDSGVPDRFTGSGSGTDFTLKISRVEADDLGIYYCWQGTHFPYTFGGGTKLEIK

SEQ ID NO: 396 - protein, 111 aa, Mus musculus
DVVMTQTPLSLPVSLGDQASISCRSSQSLVHSNGNTYLHWYLQKPGQSPKLLIYKVSNRFSGVPDRFSGSGSGTDFTLKISRVEAEDLGVYFCSQSTHVPTFGGGTKLEIK

SEQ ID NO: 397 - protein, 107 aa, Mus musculus
DIVMTQSHKFMSPSVGDRVSITCRASQDVGTAVAWYQQKPGQSPKLLFYSASYRYTGVPDRFTGGGSGTDFTFTISSVQAEDLAVYYCQQHYSSPRTFGGGTKVEIK

SEQ ID NO: 398 - protein, 112 aa, Mus musculus
DVVMTQTPLTLSVTIGQPASISCKSSQSLLDSDGKTYLNWLLQRPGQSPKRLIYLVSKLDSGVPDRFTGSGSGTDFTLKISRVEAEDLGLYYCWQGTHFPYTFGGGTKLEIK

SEQ ID NO: 399 - protein, 112 aa, Mus musculus
DVVMTQTPLTLSVTIGQPASISCRSSQSLLDSDGKTYLNWLLQRPGQSPKRLIYLVSKLDSGVPDRFTGSGSGTDFTLKISRVEAEDLGVYYCWQGTHFPYTFGGGTKLEIK

SEQ ID NO: 400 - protein, 112 aa, Mus musculus
DVVMTQTPLTLSVTIGQPASISCKSSQSLLDSDGKTYLNWLLLRPGQSPKRLIYLVSKLDSGVPDRFTGSGSGTDFTLKISRVEAEDLGVYYCWQGTHFPYTFGGGTKLEIK

SEQ ID NO: 401 - protein, 112 aa, Mus musculus
DVVVTQTPLTLSVTIGQPASISCKSSQSLLDSDGKTYLNWLLQRPGQSPKRLIYLVSKLDSGVPDRFTGSGSGTDFTLKISRVEAEDLGVYYCWQGTHFPYTFGGGTKLEIK

SEQ ID NO: 402 - protein, 107 aa, Mus musculus
DIVMTQSHKFMSTSVGDRVSITCKASQDVSTAVAWYQQKPGQSPKLLIYSASYRYTGVPDRFTGSGSGTDFTFTISSVQAEDLAVYYCQQHYSTPYTFGGGTKLEIK

SEQ ID NO: 403 - protein, 112 aa, Mus musculus
DVVMTQTPLTLSVIIGQPASISCKSGQSLLDSDGKTYLNWLLQRPGQSPKRLIYLVSKLDSGVPDRFTGSGSGTDFTLKISRVEAEDLGVYYCWQGTHFPYTFGGGTKLEIK

SEQ ID NO: 404 - protein, 112 aa, Mus musculus
DVVMTQTPLTLSATIGESASIYCKSSQSLLDSDGKTYLNWLLQRPGQSPKRLIYLVSKLDSGVPDRFTGSGSGTDFTLKISRVEAEDLGVYYCWQGTHFPYTFGGGTKLEIK

SEQ ID NO: 405 - protein, 112 aa, Mus musculus
DVVMTQTPLTLSVTIGQPASISCRSSQSLLDSDGKTYLNWLLQRPGQSPKRLIYLVSKLDSGVPDRFTGSGSGTDFTLKISGVEAEDLGAYYCWQGTHFPYTFGGGTKLEIK

SEQ ID NO: 406 - protein, 112 aa, Mus musculus
DVVMTQTPLTLSVTIGQPASIFCKSSQSLLDRDGKTYLNWLLQRPGQSPKRLIYLVSKLDSGVPDRFTGSGSGTDFTLKISRVEAEDLGVYYCWQGTHFPYTFGGGTKLEIK

SEQ ID NO: 407 - protein, 107 aa, Mus musculus
DIVMTQSHKFMSTLLGDRVSITCKASQDVSTAVAWYQQKPGQSPKLLIYSASYRYTGVPDRFTGSGSGTDFTFTISSVQAEDLAVYYCQQHYSSPRTFGGGTKVEIK

SEQ ID NO: 408 - protein, 112 aa, Mus musculus
DVVMTQTPLTLSVTIGQPASISCKSSQSLLDSDGKTYLNWLLQRPGQSPKRLIYLVSKLDSGVPDRFTGSGSGTDFTLKISRVEAEDLGVYYCWQGTHFPHTFGGGTKLEIK

SEQ ID NO: 409 - protein, 107 aa, Mus musculus
DIQMTQTTSSLSASLGDRVTISCRASQDISNYLNWYQQKPDGTVKLLIYYTSRLHSGVPSRFSGSGSGTDYSLTISNLEQEDIATYFCQQGNTLPFTFGSGTKLEIK

SEQ ID NO: 410 - protein, 112 aa, Mus musculus
DVVMTQTPLTLSVTIGQPASISCKSSQSLLDSDGKTYLNWLLQRPGQSPKRLIYLVSKLDSGVPDRFTGSGSGTDFTLKISRVEAEDLGVYYCWQGTHFPYTFGGGTKLEIQ

SEQ ID NO: 411 - protein, 112 aa, Mus musculus
DVVMTQTPLTLSVTIGQAASFSCKSSQSLLDSDGKTYLNWLLQRPGQSPKRLIYLVSKLDSGVPDRFTGSGSGTDFTLKISRVEAEDLGVYYCWQGTHFPYTFGGGTKLEIK

SEQ ID NO: 412 - protein, 107 aa, Mus musculus
DIVMTQSHKFMSTSVGDRVSITCKASQDVSKAVAWYQQKPGQSPKVVIYWASTRHTGVPDRFTGSGSGTDYTLTISSVQAEDLALYYCQQHYSTPWTFGGGTKLEIK

SEQ ID NO: 413 - protein, 107 aa, Mus musculus
DIQMTQSPASLSASVGETVTITCRASVNIHNYLAWYQQKQGKSPQLLVYNAKTLADGVPSRFSGSGSGTQSSLKINSLQPEDFGSYYCQHFWSTPYTFGGGTKLEIK

SEQ ID NO: 414 - protein, 107 aa, Mus musculus
DIVMTQSQKFMSTSVGDRVSVTCKASQNVGSNVAWYQQKPGQSPKVLIYSASYRYSGVPDRFTGSGSGTDFTLTISNVQSEDLTNYFCQQYNNYPFTFGSGTKLDIK

SEQ ID NO: 415 - protein, 107 aa, Mus musculus
DIVMTQSHKFMSTSVGDRVSITCKASQDVFTAVAWYQQKPGQSPKLLIYSASYRFTGVPDRFTGSGSGTDFTFTISSVQAEDLAVYYCQQHYSTPLTFGAGTKLELR

SEQ ID NO: 416 - protein, 107 aa, Mus musculus
DIVMTQSHKFMSTSVGDRVSITCKASQDVSTAVAWYQQKPGQSPKLLIYSASYRYTGVPDRFTGSGSGTDFTFTISSVQAEDLAVYYCQQHYSSPRTFGGGTKVEIK

SEQ ID NO: 417 - protein, 113 aa, Mus musculus
DIVLTQSPSSLSVAAGEKVTLSCKSSQSLLNSGVQKNYLAWYQQKPGRPPKLLIYGASTRESGVPDRFTGSGSGTDFTLTISSVQAEDLAIYYCQNDHRYPFTFGGGTKLEIK

SEQ ID NO: 418 - protein, 113 aa, Mus musculus
DIVLTQSPSSLRVAAGEKVTLSCKSSQSLLNSGIQKNYLAWYQQKPGQPPKLLIYGASTRESGVPDRFTGSGSGTDFTLTISSVQAEDLAVYYCQNDHRYPFTFGGGTKLEIK

SEQ ID NO: 419 - protein, 112 aa, Mus musculus
DVAMTQTPLTLSVTIGQPASISCKSGQSLLDSDGKTYLNWLLQRPGQSPKRLIYLVSKLDSGVPDRFTGSGSGTDFTLTISRVEAEDLGVYYCWQGTHFPYTFGGGTKLEIK

SEQ ID NO: 420 - protein, 112 aa, Mus musculus
DVVVTQTPLTLSVTTGQPASISCKSSQSLLDSDGKTYLNWLLQRPGQSPKRLIYLVSKLDSGVPDRFTGSGSGTDFTLKISRVEAEDLGVYYCWQGTHFPYTFGGGTKLEIK

SEQ ID NO: 421 - protein, 112 aa, Mus musculus
DVVMTQTPLTLSVTLGQPASISCKSSQSLLDSDGKTYLNWLLQRPGQSPKRLIYLVSKLDSGVPDRFTGSGAGTDFTLKISRVEAEDLGVYYCWQGTHFPYTFGGGTKLEIK

SEQ ID NO: 422 - protein, 112 aa, Mus musculus
DVVMTQTPLTLSVTIGQPASISCKSSQSLLDSDGKTYLNWLLQRPGQSPKRLIYLLSKLDSGVPNRFTGSGSGTDFTLKISRVEAEDLGVYYCWQGTHFPYTFGGGTKLEIK

SEQ ID NO: 423 - protein, 107 aa, Mus musculus
DIQMNQSPSSLSASLGDTITITCHASQNINVWLSWYQQKPGNIPKLLIYKASNLHTGVPSRFSGSGSGTGFTLTISSLQPEDIATYYCQQGQSYPLTFGSGTKLEIK

SEQ ID NO: 424 - protein, 112 aa, Mus musculus
DVVMTQTPLTLSVTIGQPASISCKSSQSLLDSDGKTYLNWLLQRPGQSPKRLIYLVSKLDSGVPDRFTGSGSGTDFSLKISRVEAEDLGVYFCWQGTHFPYTFGGGTKLEIK

SEQ ID NO: 425 - protein, 112 aa, Mus musculus
DVVMTQSPLTLSVTIGQPASISCKSSQSLLDSDGKTYLNWLLQRPGQSPKRLIYLVSKLDSGVPNRFTGSGSGTDFTLKISRVEAEDLGVYYCWQGTHFPYTFGGGTKVEIK

SEQ ID NO: 426 - protein, 112 aa, Mus musculus
DVVMTQTPLTLSVTIGQPASISCKSSQSLLDSDGQTYLNWLLQRPGQSPKRLIYLVSKLDSGVPNRFTGSGSGTDFTLKISRVEAEDLGVYYCWQGTHFPYTFGGGTKLEIK

SEQ ID NO: 427 - protein, 107 aa, Mus musculus
DIQMTQSPSSLSASLGERVSLTCRASQDIGSSLNWLQQEPDGTIQRLIYATSSLDSGVPKRFSGSRSGSDYSLTISSLESEDFVDYYCLQYASSPWTFGGGTKLEIK

SEQ ID NO: 428 - protein, 107 aa, Mus musculus
DIQMNQSPSSLSASLGDTITITCHASQNINIWLNWYQQKPGNIPKLLIYKASNLHTGVPSRFSGSGSGTGFTLIISSLQPEDIATYYCQQGQSYPYTFGGGTKLEIK

SEQ ID NO: 429 - protein, 107 aa, Mus musculus
DIQMTQSPSSLSASLGERVSLTCRASQDIGSSLNWLQQEPDGTIKRLIYATSSLDSGVPKRFSGSRSGSDYSLTISSLESEDFVDYYCLQYVSCPWTFGGGTKVEIK

SEQ ID NO: 430 - protein, 107 aa, Mus musculus
DIQMNQSPSSLSASLGDTITITCHASQNINVWLSWYQQKPGNIPKLLIYKASNLHTGVPSRFRGSGSGTGFTLSISSLQPEDIATYYCQQGQSYPLTFGGGTKLEIK

SEQ ID NO: 431 - protein, 107 aa, Mus musculus
DIQMNQSPSSLSASLGDTITITCHASQNINVWLSWYQQKPGNIPKLLIYKASNLHTGVPSRFSGSGSGTGFTLTISSLQPEDIATYYCQQGQSYPLTFGGGTKLEIK

SEQ ID NO: 432 - protein, 112 aa, Mus musculus
DVVMTQTPLTLSVTFGQPASISCKSSQSLLDSDGKTYLNWLLQRPGQSPKRLIYLVSKLDSGVPDRFTGSGSGTDFTLKISRVEAEDLGVYYCWQGTHFPYTFGGGTKLEIK

SEQ ID NO: 433 - protein, 107 aa, Mus musculus
DIQMNQSPSSLSASLGDTITITCHASQNINVWLSWYQHKSGNIPKLLIYQASNLHTGVPSRFSGSGSGTGFTLTISSLQPEDIATYYCQQGQSYPLTFGSGTKLEIK

SEQ ID NO: 434 - protein, 107 aa, Mus musculus
DIQMNQSPSSLSASLGDTITITCHASQNINVWLNWYQQKPGNIPKLLIYKASNLHTGVPSRFSGSGSGTGFTLTISSLQPEDIATYYCQQGQSYPYTFGGGTKLEIK

SEQ ID NO: 435 - protein, 112 aa, Mus musculus
NIMMTQSPSSLAVSAGEKVTMSCKSSQSVLYSSNQKNYLAWYQQKPGQSPKLLIYWASTRESGVPDRFTGSGSGTDFTLTISSVQAEDLAVYYCHQYLSSLTFGAGTKLELK

SEQ ID NO: 436 - protein, 107 aa, Mus musculus
DIQMNQSPSSLSASLGDTITITCHASQNINVWLSWYQQKPGNIPKLLIYKASTLHTGVPSRFSGSGSGSGFTLTISSLQPEDIATYYCQQGQSYPYTFGGGTKLEIK

SEQ ID NO: 437 - protein, 107 aa, Mus musculus
DIQMNQSPSSLSASLGDTITITCHASQNINIWLSWYQQKPGNIPKLLIYKASNLHTGVPSRFSGSGSGTGFTLTISSLQPEDIATYYCQQGQSYPYTFGGGTKLEIK

SEQ ID NO: 438 - protein, 107 aa, Mus musculus
DIQMNQSPSSLSASLGDTITITCHASQNINVWLNWYQQKPGNTPKLLIYKASKLHTGVPSRFSGSGSGTGFTLTISSLQPEDIATYSCQQGQSYPYTFGGGTKLEIN

SEQ ID NO: 439 - protein, 111 aa, Mus musculus
DVVMTQTPLSLPVSLGDQASISCRSSQSLVHSNGNTYLHWYLQKPGQSPKLLIYKISNRFSGVPDRFSGSGSGTDFTLKISRVEAEDLGVYFCSQSTHVPAFGGGTKLEIK

SEQ ID NO: 440 - protein, 112 aa, Mus musculus
DVVMTQTPLTLSITIGQPASISCKSSQSLLDSDGKTYLNWLLQRPGQSPKRLIYLVSKLDSGVPDRFTGSGSGTDFTLKISRVEAEDLGVYYCWQGTHFPYTFGGGTKLEIK

SEQ ID NO: 441 - protein, 112 aa, Mus musculus
DVVVTQTPLTLSVTIGQSASISCKSSQSLLDSDGKTYLNWLLQRPGQSPKRLIYLVSKLDSGVPDRFTGSGSGTDFTLKISRVEAEDLGVYYCWQGTHFPYTFGGGTKLEIK

SEQ ID NO: 442 - protein, 113 aa, Mus musculus
DIVLTQSPSSLSVAAGEKVTLSCKSSQSLLNSGIQKNYLAWYQQKPGQPPKLLIYGASTRESGVPDRFTGSGSGTDFTLTISSVQVEDLAVYYCQNDHRYPFTFGGGTKLEIK

SEQ ID NO: 443 - protein, 112 aa, Mus musculus
DVVMTQTPLTLSVTIGQPASMSCKSSQSLLDSDGKTYLNWLLQRPGQSPKRLIYLVSKLDSGVPDRFTGSGSGTDFTLKISRVEAEDLGLYYCWQGTHFPYTFGGGTKLEIK

SEQ ID NO: 444 - protein, 112 aa, Mus musculus
DVVMTQTPLTLSVTIGQPASISCKSSQSLLDSDGKTYLNWLFQRPGHSPKRLIYLVSKLDSGVPNRFTGSGSGTDFTLKISRVEAEDLGVYYCWQGTHFPYTFGGGTKLEIK

SEQ ID NO: 445 - protein, 112 aa, Mus musculus
DVVMTQTPLTLSVTIGQPASISCKSSQSLLDSDGKTYLNWLLQRPGQSPKRLIYLVSKLDSGVPDRFTGSGSGTDFTLKISRVEADDLGVYYCWQGTHFPYTFGGGTKLEIK

SEQ ID NO: 446 - protein, 112 aa, Mus musculus
DVVMTQTPLTLSVTIGQPASISCKSSQSLLDGDGRTYLNWLLQRPGQSPKRLIYLVSKLDSGVPDRFTGSGSGTDFTLKISRVEAEDLGVYYCWQGTHFPYTFGGGTKLEIK

SEQ ID NO: 447 - protein, 112 aa, Mus musculus
DVVMTQTPLTLSVIIGQPASISCRSSQSLLDSDGKTYLNWLLQRPGQSPKRLIYLVSKLDSGVPDRFTGSGSGTDFTLKISRVEAEDLGVYYCWQGTHFPYTFGGGTTLEIK

SEQ ID NO: 448 - protein, 112 aa, Mus musculus
DVVMTQTPLTLSVAIGQPASISCKSSQSLLDSDGKTYLNWLLQRPGQSPKRLIYLVSKLDSGVPKRFTGSGSGTDFTLKISRVEAEDLGVYYCWQGTHFPYTFGGGTKLEIK

SEQ ID NO: 449 - protein, 107 aa, Mus musculus
DIQMTQSPSSLSASLGERVSLTCRASQDIGSSLNWLHQGPDGTIKRLIYATYSLDSSVPKRFSGSRSGSDYSLTISSLESEDFVDYCCLLYVNSPWTFGGGTKLEIK

SEQ ID NO: 450 - protein, 112 aa, Mus musculus
DVVMTQTPLTLSVTIGQPASISCKSSQSLLDSDGRTYLNWLLKRPGQSPKRLIYLVSKLDSGVPDRFTGSGSGTDFTLKISRVEAEDLGVYYCWQGTHFPYTFGGGTKLEIK

SEQ ID NO: 451 - protein, 112 aa, Mus musculus
DVVMTQTPLTLSVTIGQPASISCKSSQSLLDSDGKTYLNWLLQRPGQSPKRLIYLVSKLDSGVPDRFTGSGSGTDFTLKISRVEAEDLGVYYCWQGTHFPYTFGGGTKLERK

SEQ ID NO: 452 - protein, 107 aa, Mus musculus
DIQMNQSPSSLSASLGDTITITCHASQNINVWLSWYQQKPGNIPKLLIYTTSILHTGVPSRFSGSGSGTGFALTISSLQPEDIATYYCQQGQSYPLTFGGGTKLEIK

SEQ ID NO: 453 - protein, 107 aa, Mus musculus
DIVMTQSHKFMSTSVGDRVYITCKASQDVFTAVAWFQQKPGQSPKLLIYSASYRYTGVPDRFTGSGSGTDFTFTISSVQAEDLAVYYCQQHYNTPLTFGAGTKLELK

SEQ ID NO: 454 - protein, 108 aa, Mus musculus
EIVLTQSPALMAASPGEKVTITCSVSSSISSSNLHWYQQKSETSPKPWIYGTSNLASGVPIRFSGSGSGTSYSLTISSMEAEDAATYYCQQWSSYPLTFGGGTKLEIK

SEQ ID NO: 455 - protein, 112 aa, Mus musculus
DVVMTQTPLTLSVTIGQPASISCRSSQSLLDSDGKTYLNWLLQRPGQSPKRLIYLVSKLDSGVPDRFTGSGSGTDFTLNISRVEAEDLGVYYCWQGTHFPYTFGGGTKLEIK

SEQ ID NO: 456 - protein, 112 aa, Mus musculus
DVVMTQTPLTLSVTIGQPASISCKSSQSLLDSDGRTYLNWLLQRPGQSPKRLIYLVSKLDSGVPDRFTGSGSGTDFTLKISRVEAEDLGVYYCWQGTHFPYTFGGGTKLEIK

SEQ ID NO: 457 - protein, 112 aa, Mus musculus
DVVMTQTALTLSVTIGQPASISCKSSQSLLDSDGKTYLNWLLQRPGQSPKRLIYLVSKLDSGVPDRFTGSGSGTVFTLKISRVEAEDLGVYYCWQGTHFPYTFGGGTKLEIK

SEQ ID NO: 458 - protein, 112 aa, Mus musculus
DVVMTQTPLTLSVTIGQPASISCKSSQSLLDGDGKTYLNWLLQRPGQSPKRLIYLVSKLDSGVPDRFTGSGSGTDFTLKISRLEAEDLGVYYCWQGTHFPYTFGGGTKLEIK

SEQ ID NO: 459 - protein, 112 aa, Mus musculus
DVVMTQTPLTLSVTLGQPASISCKSSQSLLDSDGKTYLNWLLQRPGQSPKRLIYLVSKLDSGVPDRFTGSGSGTDFTLQISRVEAADLGVYYCWQGTHFPYTFGGGTKLEIK

SEQ ID NO: 460 - protein, 112 aa, Mus musculus
DVVMTQTPLTLSVTIGQPASISCKSSQSLLDSDGKTYLNWLLQRPGQSPKRLIYLVSKLDSGVPNRFTGSGSGTEFTLKISRVEAEDLGVYYCWQGTHFPYTFGGGTKLEIK

SEQ ID NO: 461 - protein, 112 aa, Mus musculus
DVVMTQTPLTLSVTIGQPASISCRSSQSLLDGDGKTYLNWLLQRPGQSPKRLIYLVSKLDSGVPDRFTGSGSGTDFTLKISRVEAEDLGVYYCWQGTHFPYTFGGGTKLEIK

SEQ ID NO: 462 - protein, 112 aa, Mus musculus
DVVMTQTPLTLSVTIGQPASISCKSSQSLLDSDGKTYLNWLLQRPGQSPKRLIYLVSKLDSGVPDRFTGSGSGTDFTLKISRLEAEDLGVYYCWQGTHFPYTFGGGTKLEIK

SEQ ID NO: 463 - protein, 112 aa, Mus musculus
DVVMTQTPFTLSVTIGQPASISCKSSQSLLDSDGKTYLNWLLQRPGQSPKRLIYLVSKLDSGVPDRFTGSGSGTDFTLKISRVEAEDLGVYYCWQGTHFPYTFGGGTKLEIK

SEQ ID NO: 464 - protein, 112 aa, Mus musculus
DVVMTQTPLSLPVSFGDQVSISCRSSQSLANSYGNTYLSWYLHKPGQSPQLLIYGISNRFSGVPDRFSGSGSGTDFTLKISTIKPEDLGMYYCLQGTHQPWTFGGGTKLEIK

SEQ ID NO: 465 - protein, 107 aa, Mus musculus
DIQMTQSPSSLSASLGERVSLTCRASQEISGYLSWLQQKPDGTIKRLIYAASTLDSGVPKRFSGSRSGSDYSLTISSLESEDFADYYCLQYASYPRTFGGGTKLEIK

SEQ ID NO: 466 - protein, 112 aa, Mus musculus
DIVMTQAAFSNPVTLGTSASISCRSSKNLLHSNGITYLYWYLQRPGQSPQVLIYRMSNLASGVPNRFSGSGSGTDFTLRISRVEAEDVGVYYCGQLLELPYTFGGGTKLEIK

SEQ ID NO: 467 - protein, 108 aa, Mus musculus
EIVLTQSPAIMSASPGEKVTMTCSASSSVSSSYFHWYQQKSGSSPRLLIYDTSNLASGVPVRFSGSGSGTSYSLTISRMEAEDAATYYCQQWSSYPLTFGAGTKLELK

SEQ ID NO: 468 - protein, 112 aa, Mus musculus
DVLMTQTPLSLPVSLGDQASISCRSSQSIVHSDGNTYLEWYLQKPGQSPKLLIYKVSNRFSGVPDRFSGSGSGTDFTLKISRVEAEDLGDYYCFQSSHVPGTFGGGTKLEIK

SEQ ID NO: 469 - protein, 112 aa, Mus musculus
DVVVTQTPLSLPVSFGDQVSISCRSSQSLANSYGTTYLSWYLHKPGQSPQLLIYGISNRFSGVPDRFSGSGSGTDFTLKISTIKPEDLGMYYCLQGTHQPPTFGGGTKLEIK

SEQ ID NO: 470 - protein, 106 aa, Mus musculus
QIVLSQSPVILSASPGEKVTMTCRASSSVSDMHWYQQKPGSSPKPWIYATSNLASGVPARFSGSGSGTSYSFTISRVEAEDAATYYCQQWSFNPQTFGGGTKLEIK

SEQ ID NO: 471 - protein, 112 aa, Mus musculus
DVVVTQTPLSLPVSFGDQVSISCKSSQSLTNSYGDTYLSWYLHKPGQSPQLLIYGISNRFSGVPDRFSGSGSGTNFTLKISTIKPEDLGVYSCLQGTHQPWTFGGGTKLEIK

SEQ ID NO: 472 - protein, 106 aa, Mus musculus
DIQMTQSPSSLSASLGERVSLTCRASQDIGSSLNWLQQEPDGTIKRLIYATSSLDSGVPKRFSGSRSGSDYSLTISSLESEDFVDYYCLQCATSWTFGGGTKLEIK

SEQ ID NO: 473 - protein, 107 aa, Mus musculus
DIVMTQSQKFMSTSVGDRVSVTCKASQNVYTNVAWYQQKPGQSPKVLIYSASHRYSGVPDRITGSGSGTDFTLTISNVQSEDLADYFCQQHNRYPYTFGGGTKLEIK

SEQ ID NO: 474 - protein, 107 aa, Mus musculus
DIQMTQTTSSLSASLGDRVTISCSASQDISNYLNWYQQKPDGTVKLLLYYTSSLHSGVPSRFSGSGSGTDYSLTISNLEPEDIATYYCQQYSKLPYTFGGGTNLEMK

SEQ ID NO: 475 - protein, 112 aa, Mus musculus
DVVVTQTPLSLPVSFGDQVSISCRSSQSLANSYGNTYLSWYLHKPGQSPQLLIYGISNRFSGVPDRFSGSGSGTDFTLKISTVKPEDLGMYYCLQGTHQPWTFGGGTKLEIK

SEQ ID NO: 476 - protein, 112 aa, Mus musculus
DVVVTQTPLSLPVSFGDQVSISCRSSQSLTNSYGNTYLSWYLHKPGQSPQLLIYGISNRFSGVPDRFSGSGSGTNFTLKISTIKPEDLGMYYCLQGTHQPWTFGGGTKLEIK

SEQ ID NO: 477 - protein, 112 aa, Mus musculus
DVVMTQSPLSLPVSFGDQVSISCRSSQNLTNSYGNTYLSWYLHKPGQSPQLLIYGISNRFSGVPDRFSGSGSGTDFTLKISTIKPEDLGMYYCLQGTHQPWTFGGGTKLEIK

SEQ ID NO: 478 - protein, 112 aa, Mus musculus
DVVVTQTPLSLPVSFGDQVSISCRSSQSLANSYGSTFLSWYLHKPGQSPQLLIYGISNRFSGVPDRFSGSGSGTDFTLKISTVKPEDLGMYYCLQGTHQPWTFGGGTKLEIK

SEQ ID NO: 479 - protein, 107 aa, Mus musculus
DIQMTQTTSSLSASLGDRVTISCSASQGISNYLNWYQQKPDGTVTLLIYYTSSLHSGVPSRFSGSGSGTDYSLTISNLEPEDIATYYCQHYSKLPYTFGGGTKLEIK

SEQ ID NO: 480 - protein, 106 aa, Mus musculus
QIVLSQSPAILSASPGEKVTMTCRASSSVNYIHWYQQKPGSSPKPWIYATSNLASGVPARFSGSGSGTSYSLTISRVEAEDAATYYCQQWSFNPQTFGGGTKLEIK

SEQ ID NO: 481 - protein, 112 aa, Mus musculus
DVVVTQTPLSLPVSFGDQVSISCRSSQSLTNSYGDTYLSWYLHKPGQSPQLLIYGISNRFSGVPDRFSGSGSGTNFTLKISTIKPEDLGVYYCLQGTHQPWTFGGGTKLEIK

SEQ ID NO: 482 - protein, 112 aa, Mus musculus
DVVVTQTPLSLPVSFGDQVSISCRSSQSLANSYGNTYLSWYLHKPGQSPQLLIYGISNRFSGVPDRFSGSGSGTDFTLKISTIKPEDLGMYYCLQGTHQPPTFGGGTKLEIK

SEQ ID NO: 483 - protein, 112 aa, Mus musculus
DVVVTQTPLSLPVSFGDQVSISCRSSQSLANSYGNTYLSWYLHKPGQSPQLLIYGISNRFSGVPDRFSGSGSGTDFTLKISTIKPEDLGMYYCLQGTHQPLTFGAGTKLELK

SEQ ID NO: 484 - protein, 107 aa, Mus musculus
DIQMNQSPSSLSASLGDTITITCHASQNINVWLSWYQQKPGNIPKLLIYKASNLHTGVPSRFSGSGSGTGFTLTISSLQPEDIATYYCQQGQSYPWTFGGGTTLEIK

SEQ ID NO: 485 - protein, 106 aa, Mus musculus
QIVLTQSPALMSASPGEKVTMTCSASSSVSYMYWYQQKPRSSPKPWIYLTSNLASGVPARFSGSGSGTSYSLTISSMEAEDAATYYCQQWSSNPPTFGGGTKLEIK

SEQ ID NO: 486 - protein, 112 aa, Mus musculus
NIMMTQSPSSLAVSAGEKVTMSCKSSQSVLYSSNQKNFLAWYQQKPGQSPKLLIYWASTRESGVPDRFTGSGSGTDFTLTISSVQAEDLAVYYCHQYLSSYTFGGGTKLEIK

SEQ ID NO: 487 - protein, 107 aa, Mus musculus
DIKMTQSPSSMYASLGERVTITCKASQDIKNYLSWYPRKPWTSPKTLIYYATALADGVPSGFSGSGSGQDYSLTISSLESDDTATYYCLHHGESPPTFGGGTKLEIK

SEQ ID NO: 488 - protein, 107 aa, Mus musculus
DVVLTQSPATLSVTPGDSVSLSCRASQNIRNSLHWFQQKSHESPRLLINYASQSISGIPSRFRGSGSGTDFTLSINSLETEDFGMYFCLQSNSWPYTFGGGTKLEIK

SEQ ID NO: 489 - protein, 108 aa, Mus musculus
DIVLTQSPAIMAASLGQKVTMTCSASSSVNSTYFHWYQQKSGASPKTMIHRSSNLASGVPAHFSGSGSGTSDSLTISSVEADDDATYYCHQWSGYPFTFGAGTKLELK

SEQ ID NO: 490 - protein, 107 aa, Mus musculus
DIVMTQSHKFMSTSVGDRVSITCKASQDVSTDVAWYQQRPGQSPKLLIYSASYRYTGVPDRFTGSGSGTDFTFTINNVQAEDLAVYYCQQHYSTPYTFGGGTKLEIK

SEQ ID NO: 491 - protein, 107 aa, Mus musculus
DIVLTQSPATLSVTPGDSVSLSCRASQSVRNNLHWFQQKSHESPRLLIKYASQSFSGIPSRFSGSGSGTDFTLSINSLETEDFGMYFCQQSNSWPYTFGGGTKLEIK

SEQ ID NO: 492 - protein, 107 aa, Mus musculus
DIQMTQTTSSLSASLGDRVTISCSASQDISNYLNWYQQKPDGTVKLLIYYTSTLHSGVPSRFSGSGSGTDYSLTISNLEPEDIATYYCQQYSKLPYTFGGGTKLEIK

SEQ ID NO: 493 - protein, 112 aa, Mus musculus
NIMMTQSPSSLAVSAGEKVTMSCKSSQSVLYSSNQKNYLAWYQQKPGQSPKLLIYWASTRESGVPDRFTGSGSGTDFTLTISNVQAEDLAVYYCHQYLSSYTFGGGTTLEIK

SEQ ID NO: 494 - protein, 107 aa, Mus musculus
DIVMTQSQKFMSTSIGDRVSVTCKASQNVGTNVAWYQQKPGQSPKALIYSASYRYSGVPDRFTGSGSGTDFTLTISNVQSEDLADYFCQQHNSYPYTFGGGTKLEIK

SEQ ID NO: 495 - protein, 112 aa, Mus musculus
DIVMSQSPSSLAVSAGEKVTMSCKSSQSLLNSRTRKNSLAWYQQKPGQSPKLLVYWASTRESGVPDRFTGSGSGTDFTLTISSVQAEDLAVYYCKQSFNLYTFGGGTKLEIK

SEQ ID NO: 496 - protein, 107 aa, Mus musculus
DIVLTQSPATLSVTPGDSVSLSCRASQSIRNSLHWFQQKSHESPRLLINYASQSISGIPSRFRGSGSGTDFTLSINSLETEDFGMYFCQQSYSWPYTFGGGTRLEIK

SEQ ID NO: 497 - protein, 112 aa, Mus musculus
DVVMTQTPLSLPVSFGDQVSISCRSSQSLANSYGNTYLSWYLHKPGQSPHLLIYGISNRFSGVPDRFSGSGSGTDFTLKISTIKPEDLGMYYCLQGTHQPWTFGGGTKLEIK

SEQ ID NO: 498 - protein, 107 aa, Mus musculus
DIVLTQSPATLSVTPGDSVSLSCRASQNIRNSLHWFQQKSHESPRLLINYASQSISGIPSRFRGSGSGTDFTLSINSLETEDFGMYFCLQSNSWPYTFGGGTKLEIK

SEQ ID NO: 499 - protein, 107 aa, Mus musculus
DIVMTQSPATLSVTPGDRVSLSCRASQSISDYLHWYQQKSHESPRLLIKYASQSISGIPSRFSGSGSGSDFTLSINSVEPEDVGVYYCQDGNTFPPTFGGGTKLEIK

SEQ ID NO: 500 - protein, 108 aa, Mus musculus
EIVLTQSPAIMSASPGEKVTVTCSAGSSVSSSYLHWYQQKSGSSPRLLIYDTSKLASGVPVRFSGSGSGTSYALTISRMEAEDAATYYCQQWSSYPLTFGAGTKLELK

SEQ ID NO: 501 - protein, 107 aa, Mus musculus
DIVMTQSQKFMSTSIGDRVSVTCKASQNVVTNVAWYQQKPGQSPKALIYSASYRYSGVPDRFTGSGSGTDFTLTISNVQSEDLADYFCQQHNSYPYTFGGGTRLEIK

SEQ ID NO: 502 - protein, 112 aa, Mus musculus
DVVVTQTPLSLPVSFGDQVSISCRSSQSLANSYGNTYLSWYLHKPGQSPHLLIYGISNRFSGVPDRFSGSGSGTDFTLKISTIEPEDLGMYYCLQGTHQPWTFGGGTKLEIK

SEQ ID NO: 503 - protein, 112 aa, Mus musculus
DVVVTQTPLSLPVSFGDQVSISCRSSQSLANSYGTTYLSWYLHKPGQSPQLLIYGISNRFSGVPDRFSGSGSGTDFTLKISTVKPEDLGMYYCLQNTHQPPTFGGGTKLEIK

SEQ ID NO: 504 - protein, 112 aa, Mus musculus
DVLMTQTPLSLPVSLGDQASISCRSSQSIVYSNGNTYLAWYLQKPGQSPKLLIYKVSNRFSGVPDRFSGSGSGTDFTLKISRVEAEDLGVYYCFQGSHVPFTFGSGTKLEIK

SEQ ID NO: 505 - protein, 112 aa, Mus musculus
DVVVTQTPLSLPVSFGDQVSISCRSSQSLANSYGTTYLSWYLYKPGQSPQLLIYGISNRFSGVPDRFSGSGSGTDFTLKISTIKPEDLGMYYCLQGTHQPPTFGGGTKLEIK

SEQ ID NO: 506 - protein, 107 aa, Mus musculus
DIQMTQSSSYLSVSLGGRVTITCKASDHINNWLAWYQQKPGNAPRLLISGATSLETGVPSRFSGSGSGKDYILSITSLQTEDVATYYCQQYWSTPFTFGSGTKLEIK

SEQ ID NO: 507 - protein, 112 aa, Mus musculus
NIMMTQSPSSLAVSAGEKVTMSCKSSQSVLYSSNQKNYLAWYQQKPGQSPKLLIYWASTRESGVPDRFTGSGSGTDFTLTISSVQAEDLAVYYCHQYLSSLTFGAGTKLELR

SEQ ID NO: 508 - protein, 112 aa, Mus musculus
DVVVTQTPLSLPVSFGDQVSISCRSSQSLANSYGTTYLSWYLHKPGQSPQLLIYGISNRFSGVPDRFSGSGSGTDFTLKISTVKPEDLGMYYCLQGTHQPPTFGGGTKLEIK

SEQ ID NO: 509 - protein, 107 aa, Mus musculus
DIQMTQSPASLSASVGETVTITCRSSENIYSYLAWYQQKQGKSPQLLVYNAKILAEGVPSRFSGSGSGTQYSLKINSLQPEDFGSYYCQHHYGTPPTFGGGTNLEIK

SEQ ID NO: 510 - protein, 112 aa, Mus musculus
DVVMTQTPLSLPVSFGDQVSISCRSSQSLANSYGNTYLSWYLHKPGQSPHLLIYGISNRFSGVPDRFSGSGSGTDFTLKISTIKPEDLGMYYCLQGTHQPWTFGGGTKLEIR

SEQ ID NO: 511 - protein, 107 aa, Mus musculus
DIQMTQSSSYLSVSLGGRVTITCKASDHINNWLAWYQQKPGNSPRLLISGATSLGAGVPSRFSGSGSGKDYTLSITSLQTEDVGTYYCQQYWSIPFTFGSGTKLEIK

SEQ ID NO: 512 - protein, 106 aa, Mus musculus
QVVLTQSPAIMSASPGEKVTMTCSASSSVSYMHWYQQKSGTSPKRWIYATSKLASGVPARFSGNGSGTSYSLTISSMEAEDAATYYCQQWNSNPPTFGAGTKLDLK

SEQ ID NO: 513 - protein, 112 aa, Mus musculus
DVVVTQTPLSLPVSFGDQVSISCRSSQSLANSYGDTFLSWYLHKPGQSPQLLIYGISNRFSGVPDRFSGSGSGTDFTLKISTIKPEDLGMYYCLQGTHQPLTFGAGTKLELK

SEQ ID NO: 514 - protein, 112 aa, Mus musculus
DVLMTQTPLSLPVSLGDQASISCRSSQSIVHSDGNTYLEWYLQKPGQSPKLLIYKVSNRFSGVPDRFSGSGSGTDFTLKISRVEAEDLGVYYCFQSSHVPGTFGGGTKLEIK

SEQ ID NO: 515 - protein, 107 aa, Mus musculus
DIQMTQSSSYLSVSLGGRVTITCKASDHINNWLAWYQQKPGNAPRLLISGATSLKTGVPSRFSGSGSGKDYTLSITSLQTEDVATYYCQQYWSTPFTFGSGTKLEIK

SEQ ID NO: 516 - protein, 107 aa, Mus musculus
DIVLTQSPATLSVTPGDSVSLSCRASQSIYNNLHWYQQNSHESPRLLIKYASQSISGIPSRFSGSGSGTDFTLSINSVETEDFGLYFCQQSNSWPYTFGGGTRLEIN

SEQ ID NO: 517 - protein, 108 aa, Mus musculus
EIVLTQSPAIMSASPGEKVTVTCSAGSSVSSSNLHWYQQKSGSSPRLLIYDTSKLASGVPVRFSGSGSGTSYALTISRMEAEDAATYYCQQWSSYPLTFGAGTKLELK

SEQ ID NO: 518 - protein, 112 aa, Mus musculus
NIMMTQSPSSLAVSAGEKVTMSCKSSQNILYSSNQKNYLAWYQQKPGQSPKLLIYWASTRESGVPDRFTGSGSGTDFTLTISSVQAEDLAVYYCHQYLSSYTFGGGTKLEIK

SEQ ID NO: 519 - protein, 107 aa, Mus musculus
DIQMTQTTSSLSASLGDRVTISCSASQGISNYLNWYQQKPDGTVTLLIYYTSSLNSGVPSRFSGSGSGTDYSLTISNLEPEDIATYYCQHYSKLPYTFGGGTKLEMK

SEQ ID NO: 520 - protein, 107 aa, Mus musculus
DIQMTQTTSSLSASLGDRVTISCSASQGLSNYLHWYQQKPDGTVKLLIYYTSSLHSGVPSRFSGSGSGTDYSLTISNLEPEDIATYYCQQYSKLPYTFGGGTKLEIK

SEQ ID NO: 521 - protein, 107 aa, Mus musculus
DIVLTQSPATLSVTPGDSVSLSCRASQSIRNSLHWFQQKSHESPRLLINYASQSVSGIPSRFRGSGSGTDFTLSINSLETEDFGMYFCQQSNSWPYTFGGGTKLEIK

SEQ ID NO: 522 - protein, 112 aa, Mus musculus
NIMMTQSPSSLAVSAGEKVTMSCKSSQSVLYSSNQMNYLAWYQQKPGQSPKVLIYWASTRESGVPDRFTGGGSGTDFTLTISSVQAEDLALYYCHQYLSSLTFGAGTKLELK

SEQ ID NO: 523 - protein, 107 aa, Mus musculus
DVVLTQSPATLSVTPGDSVSLSCRASQTISNNLHWFQQKSHESPRLLIKYSSQSISGIPSRFSGSGSGTDFTLSINSVETEDFGMYFCQQSYSWPYTFGGGTKLEIK

SEQ ID NO: 524 - protein, 107 aa, Mus musculus
DIVMTQSQKFMSTSVGDRVSITCKASQNVVTNVAWYQQKPGQSPKALIYSASYRYSGVPDRFTGSGSGTDFTLTISNVQSEDLADYFCQQHNSYPYTFGGGTKLEIK

SEQ ID NO: 525 - protein, 107 aa, Mus musculus
DIVLTQSPATLSVTPGDSVSLSCRASQNIRNSLHWFQQKSHESPRLLINYASQSISGIPSRFRGSGSGTDFTLTINSLETEDFGVYFCQQSNSWPYTFGGGTKLEIK

SEQ ID NO: 526 - protein, 106 aa, Mus musculus
QIVLSQSPAILSASPGEKVTMTCRASSSVNYMHWYQQKPGSSPKPWIYATSNLASGVPARFSGSGSGTSYSLTISRVEAEDAATYYCQQWNFNPQTFGGGTKLEIK

SEQ ID NO: 527 - protein, 107 aa, Mus musculus
DIQMTQSSSYLSVSLGGRVTITCKASDHINNWLAWYQQKPGNAPRLLISGATSLGAGVPSRFSGSGSGKDYTLSITSLQTEDVATYYCQQYWSIPFTFGSGTKLEIK

SEQ ID NO: 528 - protein, 112 aa, Mus musculus
DVVLTQTPLSLPVSLGDQVSISCRSSQSLTNSYGSTFLSWYLHKPGQSPQLLIYGISNRFSGVPDRFSGSGSGTDFTLKISTVKPEDLGMYYCLQGTHQPWTFGGGTKLEIK

SEQ ID NO: 529 - protein, 107 aa, Mus musculus
DIVLTQSPATLSVTPGDSVSLSCRASQNIRNNLHWFQQKSHESPRLLIKYASQSISGIPSRFSGSGSGTDFTLSINSLETEDFGMYFCQQSNSWPYTFGGGTKLEIK

SEQ ID NO: 530 - protein, 108 aa, Mus musculus
QIVLTQSPAIMSASLGERVTMTCTASSSVISSYLHWYQQKPGSSPKLWIYSTSNLASGVPARFSGSGSGTSYSLTISSMEAEDAATYYCHQYHRSPLTFGAGTKLELK

SEQ ID NO: 531 - protein, 112 aa, Mus musculus
DVLMTQSPLSLPVSLGDQASISCRSSQSIVHSDGNTYLEWYLQKPGQSPKLLIYKVSRRFSGVPDRFSGSGSGTDFTLKISRVGAEDLGVYYCFQGSHVPGTFGGGTKLEIK

SEQ ID NO: 532 - protein, 112 aa, Mus musculus
DVVMTQTPLSLPVSFGDQVSISCRSSQNLTNSYGNTYLSWYLHKPGQSPQLLIYGISNRFSGVPDRFSGSGSGTDFTLKISTIKPEDLGMYYCLQGTHQPWTFGGGTKLEIK

SEQ ID NO: 533 - protein, 106 aa, Mus musculus
QIVLTQSPAIMSASPGEKVTMTCSASSSVNYMHWYQQKSGTSPKRWIYDTSKLASGVPARFSGSGSGTSYSLTISSMEAEDAATYYCQQWNSNPPTFGAGTKLELK

SEQ ID NO: 534 - protein, 107 aa, Mus musculus
AIQMTQTTSSLSASLGDRVTISCSASQGIGNYLNWYQQKPDGTVKLLIYYTSSLHSGVPSRFSGSGSGTDYSLTISDLEPEDIATYYCHQYSKLPYTFGGGTKLEIK

SEQ ID NO: 535 - protein, 112 aa, Mus musculus
DIVMTQAAFSNPVTLGTSASISCRSSKNLLHSNGITYLYWYLQRPGQSPQLLIYRVSNLASGVPNRFSGSESGTDFTLRISRVEAEDVGVYYCGQLLELPYTFGGGTKLEIK

SEQ ID NO: 536 - protein, 106 aa, Mus musculus
QIVLTQSSAIMSASPGEKVTMTCSATSSVSSMHWYQQKSGTSPKRWIYDTSKLASGVPARFSGSGSGTSYSLTISSMEAEDAATYYCQQWSSNPSTFGAGTKLELK

SEQ ID NO: 537 - protein, 107 aa, Mus musculus
DIVLTQSPATLSVTPGDSVSLSCRASQSIRSSLHWFQQKSHESPRLLITYASQSISGIPSRFSGSGSGTDFTLSINSLETEDFGVYFCQQSNTWPYTFGGGTKLEIK

SEQ ID NO: 538 - protein, 107 aa, Mus musculus
DIVLTQSPATLSVTPGDSVSLSCRASQSIRNSLHWFQQKSHESPRLLINYASQSISGIPSRFRGSGSGTDFTLSINSLETEDFGMYFCQQSNSWPYTFGGGTKLEIK

SEQ ID NO: 539 - protein, 112 aa, Mus musculus
DVVMTQTPLTLSVTIGQPASISCKSSQSLLDSDGKTYLNWLLQRPGQSPKRLIYLVSKLDSGVPDRFTGSGSGTDFTLKISRVEAEDLGVYYCWQGTHFPRTFGGGTKLEIK

SEQ ID NO: 540 - protein, 107 aa, Mus musculus
DIQMNQSPSSLSASLGDTITITCHASQNINVWLSWYQQKPGNIPKLLIYKASNLHTGVPSRFSGSGSGAGFTLTISSLQPEDIATYYCQQGQSYPWTFGGGTKLEIK

SEQ ID NO: 541 - protein, 107 aa, Mus musculus
DIQMTQSPASLSASVGETVTITCRSSENIYSYLAWYQQKQGKSPQLLVYNAKILAEGVPSRFSGSGSGTQYSLKINSLQPEDFGTYYCQHHYGTPPTFGGGTNLEIK

SEQ ID NO: 542 - protein, 112 aa, Mus musculus
DVLMTQTPLSLPVSLGDQASISCRSSQNIVHSNGNTYLEWYLQKPGQSPKLLIYKVSNRFSGVPDRFSGSGSGTDFTLKISRVEAEDLGVYYCFQTSHVPGTFGGGTKLEIK

SEQ ID NO: 543 - protein, 107 aa, Mus musculus
DIQMTQSPSYLSVSLGGRVTINCKASDHINNWLAWYQQKPGNAPRLLISGATSLETGVPSRFSGSGSGKDYTLSITSLQTEDAATYYCQQYWSIPFTFGSGTKLEIK

SEQ ID NO: 544 - protein, 106 aa, Mus musculus
QIVLTQSPAIMSASPGEKVTMTCSASSSVTYMYWYQQKSGSSPRLLIYDTSNLASGVPVRFSGSGSGTSYSLTISRMEAEDAATYYCQHWSSYPLTFGAGTKLELK

SEQ ID NO: 545 - protein, 107 aa, Mus musculus
DIVLTQSPATLSVTPGDSVSLSCRASQSIRNNLHWFQQKSHESPRLLIKYVSQSISGIPSRFSGSGSGTDFTLNINSLEAEDFGMYFCQQSISWPYTFGGGTKLEIK

SEQ ID NO: 546 - protein, 107 aa, Mus musculus
DIVLTQSPATLSVTPGDSVSLSCRASQSIRNSLHWFQQKSHESPRLLINYASQSMSGIPSRFRGSGSGTDFTLSINSLETEDFGMYFCQQTNSWPYTFGGGTKLEIK

SEQ ID NO: 547 - protein, 107 aa, Mus musculus
DIVMTQSQKFMSTSIGDRVSVTCKASQNVVTNVAWYQQRPGQSPKALIYSASYRYSGVPDRFAGSGSGTDFTLTISNVQSEDLADYFCQQHNSYPYTFGGGTKLEIK

SEQ ID NO: 548 - protein, 112 aa, Mus musculus
DVVVTQTPLSLPVSFGDQVSISCRSSQSLANSYGTTYLSWYLHKPGQSPQLLIYGISNRFSGVPDRFSGSGSGTDFTLRISTIKPEDLGMYYCLQGTHQPPTFGGGTKLEIK

SEQ ID NO: 549 - protein, 112 aa, Mus musculus
DIVMTQAAFSNPVTLGTSASISCRSSKNLLHSNGITYLYWYLQRPGQSPQLLIYRMSNLASGVPNRFSGSGSGTDFTLRISRVEAEDVGVYYCGQLLELPYTFGGGTKLEIK

SEQ ID NO: 550 - protein, 107 aa, Mus musculus
DIVMTQSQKFMSTSIGDRVSVTCKASQNVVTNVAWYQQKPGQSPKALIYSASYRYSGVPDRFTGSGSGTDFTLTINNVQSEDLADYFCQQHNSYPYTFGGGTKLEIK

SEQ ID NO: 551 - protein, 107 aa, Mus musculus
DILLTQSPAILSVSPGERVSFSCRASQSIGTSIQWYQQRTNGSPRLLIKYGSESISGIPSRFSGSGSGTDFTLSINSVESEDSADYYCQQSYRWPYTFGGGSKLEIK

SEQ ID NO: 552 - protein, 107 aa, Mus musculus
DIQMTQSSSYLSVSLGGRVTITCKASDHINNWLAWYQQKPGNAPRLLISGATSLETGVPSRFSGSGSGKDYTLSITSLQTEDVATYYCQQYWSIPFTFGSGTKLEIK

SEQ ID NO: 553 - protein, 112 aa, Mus musculus
DVVVTQTPLSLPVSFGDQVSISCRSSQSLTNSYGNTFLSWYLHKPGQSPQLLIYGISNRFSGVPDRFSGSGSGTNFTLKISTIKPEDLGMYYCLQGTHQPWTFGGGTKLEIK

SEQ ID NO: 554 - protein, 108 aa, Mus musculus
EIVLTQSPAIMSASPGEKVTMTCSAGSSVSSSYLHWYQQKSGSSPRLLIYDTSNLASGVPVRFSGSGSGTSYSLTISPMEAEDAATYYCQQWSSYPLTFGAGTKLELK

SEQ ID NO: 555 - protein, 112 aa, Mus musculus
NIMMTQSPSSLAVSAGEKVTMSCKSSQSVLYSSNQMNYLAWYQQKPGQSPKLLIYWASTRESGVPDRFTGSGSGTDFTLTISSVQAEDLALYYCHQYLSSLTFGAGTKLELK

SEQ ID NO: 556 - protein, 112 aa, Mus musculus
DVLMTQTPLSLPVSLGDQASISCRSSQNIVHSNGNTYLEWYLQKPGQSPKLLIYKVSNRFSGVPDRFSGSGSGTDFTLKISRVEAEDLGVYYCFQGSHVPYTFGGGTKLEIK

SEQ ID NO: 557 - protein, 107 aa, Mus musculus
DIQMTQPTSSLSASLGDRVTISCSASQGISSYLNWYQQKPDGTVTLLIYYTSSLHSGVPSRFSGSGSGTDYSLTISNLEPEDIATYYCQHYSKLPYTFGGGTKLEIK

SEQ ID NO: 558 - protein, 111 aa, Mus musculus
DIVLTQSPASLAVSLGQRASISCRASESVDKYGISFMSWFQQKPGQPPKLLIYAASNQGSGVPARFSGSGSGTDFSLNIHPMEEDDTAMYFCQQSKEVPWTFGGGTKLEIK

SEQ ID NO: 559 - protein, 112 aa, Mus musculus
DVVVTQTPLSLPVSFGDQVSISCRSSQSLANSYGTTYLSWYLHKPGQSPQLLIYEISNRFSGVPDRFSGSGSGTDFTLKISTIKPEDLGMYYCLQGTHQPPTFGGGTKLEIK

SEQ ID NO: 560 - protein, 111 aa, Mus musculus
DIVVTQSPASLAVSLGQRATISCRASESVDSYGKSFIHWYQQKPGQPPKLLIYVASNLESGVPARFSGSGSRTDFTLTIDPVEADDAATYYCQQNNEDPWTFGGGTKLEIK

SEQ ID NO: 561 - protein, 107 aa, Mus musculus
DILLTQSPAILSVSPGERVSFSCRASQSIGTSIQWYQQRTNGSPRLLIKYGSESISGIPSRFSGSGSGTDFTLSINSVESEDIADYYCQQSYRWPYTFGGGTKLEIK

SEQ ID NO: 562 - protein, 107 aa, Mus musculus
DIVLSQSPATLSVTPGDSVSLSCRASQSIRNNLHWFQQKSHESPRLLITYASQSISGIPPRFSGSGSGTDFTLSINSLETEDFGMFFCQQSNSWPYTFGGGTKLEIK

SEQ ID NO: 563 - protein, 107 aa, Mus musculus
DIVMTQSQKFMSTSVGDRVSITCKASQHVVTNVAWYQQKPGQSPKALIYSASYRYSGVPDRFTGSGSGTDFTLTISNVQSEDLADYFCQQHNSYPYTFGGGTKLEIK

SEQ ID NO: 564 - protein, 107 aa, Mus musculus
DILLTQSPAILSVSPGERVSFSCRASQNIGTSIHWYQQRTNGSPRLLIKYAFESISGIPSRFSGSGSGTDFTLSINSVESEDIADYYCQQSNSWPLTFGAGTKLELK

SEQ ID NO: 565 - protein, 107 aa, Mus musculus
DIQMTQSSSYLSVSLGGRVTITCRASDHINNWLAWYQQKPGNAPRLLISGATSLETGVPSRFSGSGSGKDYTLSITSLQTEDVATYYCQQYWSIPFTFGSGTKLEIK

SEQ ID NO: 566 - protein, 107 aa, Mus musculus
DIQMTQSSSYLSVSLGGRVTITCKASDHINNWLAWYQQKPGNAPRLLISGATSLKTGVPSRFSGSGSGKDYTLSITSLQIEDVATYYCQQYWSIPFTFGSGTKLEIK

SEQ ID NO: 567 - protein, 107 aa, Mus musculus
DIVLTQSPATLSVTPGDSVSLSCRASQSIRNSLHWFQQKSHESPRLLIKYVFQSISGIPSRFSGSGSGTDFTLSINSLETEDFGMYFCQQSNSWPYTFGGGTKLEIK

SEQ ID NO: 568 - protein, 106 aa, Mus musculus
QIVLTQSPAIMSASPGEKVTMTCSATSSVSSMHWYQQKSGTSPKRWIYDTSKLASGVPGRFSGSGSGTSYSLTISSMEAEDAATYYCQQWSSNPSTFGAGTKLELK

SEQ ID NO: 569 - protein, 107 aa, Mus musculus
DIVLTQSPATLSVTPGDSVSLSCRASQSIRNSLHWFQQKSLESPRLLINYASQSISGIPSRFRGSGSGTDFTLSINNLETEDFGMYFCQQTNSWPYTFGGGTKLEIK

SEQ ID NO: 570 - protein, 107 aa, Mus musculus
DIVLTQSPATLSVTPGDSVSLSCRASQSIRNNLHWYQQKSHESPRLLIKYASQSISGIPSRFSGSGSGTNFTLSINSVETEDFGMYFCQQSYSWPYTFGGGTKLEIN

SEQ ID NO: 571 - protein, 107 aa, Mus musculus
DIVMTQSQKFMSTSVGDRVSVTCKASQNVVTNVAWYQQKPGQSPKPLIYSASYRNSGVPDRFTGSGSGTDFTLTISNVQSEDLAEYFCQQYKSYPYTFGGGTKLEIK

SEQ ID NO: 572 - protein, 112 aa, Mus musculus
DVVVTQTPLSLPVSFGDQVSISCRSSQSLANSYGNTYLSWYLHKPGQSPQLLIYGISNRFSGVPDRFSGSGSGTDFTLKISTIKPEDLGMYYCLQGTHQPWTFGGGTKLEIK

SEQ ID NO: 573 - protein, 112 aa, Mus musculus
DVLMTQTPLSLPVSLGDQASISCRSSQNIVHSNGNTYLEWYLQKPGQSPKLLIYKVSKRFSGVPDRFSGSGSGTDFTLKISRVEAEDLGVYYCFQTSHVPGTFGGGTKLEIK

SEQ ID NO: 574 - protein, 112 aa, Mus musculus
DIVLTQAAFSNPVTLGTSVSISCRSSKNLLHSNGITYLYWHLQRPGQSPQLLIYRVSNLASGVPNRFSGSESGTDFTLRISRVEAEDVGVYYCAQLLELPYTFGGGTKLEIK

SEQ ID NO: 575 - protein, 107 aa, Mus musculus
DIQMTQTTSSLSASLGDRVTISCSASQGISNYLNWYQQKPDGTVKLLIYYTSSLHSGVPSRFSGSGSGTDYSLTISNLEPEDIATYYCQHYSKLPYTFGGGTKLEIK

SEQ ID NO: 576 - protein, 107 aa, Mus musculus
DIVLTQSPATLSVTPGDSVSLSCRASQSIRNNLHWYQQKSHESPRLLIKYSSQSISGIPSRFSGSGSGTDFTLSINSVETEDFGMYFCQQSNSWPYTFGGGTKLEIN

SEQ ID NO: 577 - protein, 111 aa, Mus musculus
DIVLTQSPASLAVSLGQRATISCRASQSVSTSRYSYMHWYQQKPGQSPKLLIKYASNLESGVPARFSGSGSGTDFTLNINPVEEEDTATYYCQHSWEIPLTFGAGTKLELK

SEQ ID NO: 578 - protein, 107 aa, Mus musculus
DIVLTQSPATLSVTPGDSVSLSCRASQSIRNNLHWYQQKSHESPRLLIKYASQSISGIPSRFSGSGSGTDFTLSINSVETEDFGMYFCQQSNSWPYTFGGGTKLEIN

SEQ ID NO: 579 - protein, 106 aa, Mus musculus
QIVLTQSPEIMSASPGEKVTMTCSASSSVSHMHWYQQKSGTSPKRWIYDTSKLASGVPARFSGSGSGTSYSLTISSMEAEDSATFYCQQWNNNPLTFGAGTKLELK

SEQ ID NO: 580 - protein, 107 aa, Mus musculus
DVVLTQSPATLSVTPGDSVSLSCRASQTISNNLHWYQQKSHESPRLLIKYSSQSISGIPSRFSGSGSGTDFTLSINSVETEDFGMYFCQQSYSWPYTFGGGTKLEIK

SEQ ID NO: 581 - protein, 112 aa, Mus musculus
DVVMTQTPLSLPVSFGDQVSISCRSSQSLANSYGNTYLSWYLHKPGQSPHLLIYGISHRFSGVPDRFSGSGSGTDFTLKISTIKPEDLGMYYCLQGTHQPWTFGGGTKLEIK

SEQ ID NO: 582 - protein, 106 aa, Mus musculus
QIVLTQSPEIMSASPGEKVTMTCSASSSVSHMHWYQQKSGTSPKRWIYDTSKLASGVPARFSGSGSGTSYSLTISSMEAEDSATYFCQQWNNNPLTFGAGTKLELK

SEQ ID NO: 583 - protein, 112 aa, Mus musculus
DVLMTQTPLSLPVSLGDQASISCRSSQSIVHSDGNTYLQWYLQKPGQSPKLLIYKVSRRFSGVPARFSGSGSGTDFTLKISRVEAEDLGVYFCFQGSHVPGTFGGGTKLEII

SEQ ID NO: 584 - protein, 112 aa, Mus musculus
DIVMTQAAFSNPVTLGTSASISCRSSKNLQHNNGITYLYWYLQRPGQSLQLLIYRVSNLASGVPNRFSGSESGTDFTLRISRVEPEDVGVYYCGQLLELPYTFGGGTRLEIK

SEQ ID NO: 585 - protein, 106 aa, Mus musculus
QIVLTQSPAIMSASPGEKVTMTCSASSSVSHMHWYQQKSGTSPKRWIYDTSKLASGVPVRFSGSGSGTSYSLTISSMEAEDAATYYCQQWNSNPSTFGAGTKLELK

SEQ ID NO: 586 - protein, 107 aa, Mus musculus
DIQMTQSSSYLSVSLGGRVTITCKASDHIHNWLAWYQQKPGNSPRLLISGATSLEAGVPSRFSGSGSGKDYTLSITSLQTEDVGTYYCQQYWSIPFTFGSGTKLEIK

SEQ ID NO: 587 - protein, 107 aa, Mus musculus
DIVLTQSPATLSVTPGDSVSLSCRASQSIRNSLHWFQQKSHESPRLLIKYASQSMSGIPSRFSGSGSGTDFTLSINSLETEDFGMYFCQQSNSWPYTFGGGTKLEIK

SEQ ID NO: 588 - protein, 107 aa, Mus musculus
DIQMTQSSSYLSVSLGGRVTITCKASDHINNWLAWYQQKPGNAPRLLISGATSLETGVPSRFSGSGSGKDYILSITRLQTEDVATYYCQQYWSTPFTFGSGTKLEIK

SEQ ID NO: 589 - protein, 107 aa, Mus musculus
DLVLTQSPATLSVTPGDSVSLSCRASQSIRNNLHWFQQKSHESPRLLITYVSQSISGIPSRFSGSGSGTDFTLSINSLETEDFGMYFCQQSNSWPYTFGGGTKLEIK

SEQ ID NO: 590 - protein, 107 aa, Mus musculus
DIVLTQSPATLSVTPGDSVSLSCRASQSIYNNLHWYQQKSHESPRLLIKFSSQSISGIPSRFSGSGSGTDFTLNINSVETEDFGMYFCQQSNSWPYTFGGGTKLEIK

SEQ ID NO: 591 - protein, 107 aa, Mus musculus
DIVLTQSPATLSVTPGDSVSLSCRASQNIRNSLHWFQQKSHESPRLLINYASQSISGIPSRFRGGGSGTDFTLSINSLETEDFGMYFCLQSNSWPYTFGGGTKLEIK

SEQ ID NO: 592 - protein, 112 aa, Mus musculus
DVVVTQTPLSLPVSFGDQVSISCRSSQSLANSYGNTYLSWYLHKPGQSPQLLIYGISNRFSGVPDRFSGSGSGTDFTLKISTIKPEDLGMYFCLQGTHQPLTFGAGTKLELK

SEQ ID NO: 593 - protein, 107 aa, Mus musculus
DIQMTQSSSYLSVSLGGRVTITCKASDHINNWLAWYQQKPGNAPRLLISGATSLKTGVPSRFSGSGSGKDYILSITSLQTEDVGTYYCQQYWSIPFTFGSGTKLEIK

SEQ ID NO: 594 - protein, 112 aa, Mus musculus
DVLMTQTPLSLPVSLGDQASISCRSSQSIVHSDGNTYLEWYLQKPGQSPKLLIYKVSRRFSGVPDRFSGSGSGTDFTLKIRRVEAEDLGVYYCFQGSHVPGTFGGGTKLEIK

SEQ ID NO: 595 - protein, 107 aa, Mus musculus
DIVLTQSPATLSVTPGDSVSLSCRASQSIRNSLHWFQQKSHESPRLLINYASQSISGIPSRFRGSGSGTDFTLIINSLETEDFGMYFCQQSNSWPYTFGGGTKLEIK

SEQ ID NO: 596 - protein, 107 aa, Mus musculus
DIQMTQSSSYLSVSLGGRVTITCKASDHINNWLAWYQQKPGNSPRLLISGATSLGAGVPSRFSGSGSGKDYTLSITSLQTEDVATYYCQQYWSIPFTFGSGTKLEIK

SEQ ID NO: 597 - protein, 107 aa, Mus musculus
DILLTQSPAILSVSPGERVSFSCRASQNIGTSIHWYQQRTSGSPRLLIKSASESISGIPSRFSGSGSGTDFTLSINSVESEDIADYYCQQSNRWPYTFGGGTKLEIK

SEQ ID NO: 598 - protein, 106 aa, Mus musculus
QIVLTQSPAIMSASPGEKVTMTCSASSSVSQMHWYQQKSGTSPKRWIYDTSKLASGVPARFSGSGSGTSYSLTLSSMEAEDAATYYCQQWSSNPSTFGVGTKLELK

SEQ ID NO: 599 - protein, 112 aa, Mus musculus
DVLMTQSPLSLPVSLGDQASISCRSSQSIVHSDGNTYLEWYLQKPGQSPKLLIYKVSRRFSGVPDRFSGSGSGTDFTLEISRVGAEDLGVYYCFQASHVPGTFGGGTKLEIK

SEQ ID NO: 600 - protein, 107 aa, Mus musculus
DIKMTQSPSSMYASLGERVTITCKASRDIKSYLSWYQQKPWKSPKTLIFYATRLADGVPSRFSGSGSGQDFSLTISSLESDDTATYYCLHHGESPYTFGGGTKLEIK

SEQ ID NO: 601 - protein, 107 aa, Mus musculus
DIKMTQSPSSMYASLGERVTITCKASQDIKSYLSWYQQKPWKSPKTLIFYATRLADGVPSRFSGSGSGQDFSLTISSLESDDTATYYCLHHGESPYTFGGGTKLEIK

SEQ ID NO: 602 - protein, 107 aa, Mus musculus
DIQMTQSSSYLSVSLGGRVTITCKASDHINNWLAWYQQRPGNAPRLLISGATSLGTGVPSRFSGSGSGKDYTLSITSLQTEDVATYYCQQYWSIPFTFGSGTKLEIN

SEQ ID NO: 603 - protein, 107 aa, Mus musculus
DIVMTQSHKFMSTSVGDRVSITCKASQDVSTAVAWYQQKPGQSPKLLIYSASYRYTGVPDRFTGSGSGTDFTFTISSVQAEDLAVYYCQQHYSSPRTFGGGTKLEIK

SEQ ID NO: 604 - protein, 108 aa, Mus musculus
EIVLTQSPAIMSASPGEKVTVTCSAGSSVNSTYLHWYQQKSGSSPRLLIYDTSKLASGVPVRFSGSGSGTSYALTISRMEAEDAATYYCQQWSSYPLTFGAGTKLELK

SEQ ID NO: 605 - protein, 108 aa, Mus musculus
EIVLTQSPAIMSASPGEKVTMTCSASSSVSSSYLHWYQQKSGSSPRLLIYDTSNLASGVPVRFSGSGSGTSYSLTISRMEAEDAATYYCQQWSSYPLTFGAGTKLELK

SEQ ID NO: 606 - protein, 107 aa, Mus musculus
DIVLTQSPATLSVTPGDSVSLSCRASQSIRNNLHWFQQKSHESPRLLITYASQSISGIPSRFSGSGSGTDFTLSINSLETEDFGIYFCQQSNSWPYTFGGGTKLEIK

SEQ ID NO: 607 - protein, 106 aa, Mus musculus
QIVLTQSPAIMSASPGEKVTISCSASSSVSYMYWYQQKPGSSPKPWIYRTSNMASGVPARFSGSGSGTSYSLTISSMEAEDAATYYCQQYHGYPPTFGGGTKLEIK

SEQ ID NO: 608 - protein, 107 aa, Mus musculus
DIVMTQSQKFMSTSIGDRVSVTCKASQNVVTNVAWYQQKPGQSPKALIYSASYRYSGVPDRFTGSGSGTDFTLTISNVQSEDLADYFCQQHNSYPYTFGGGTKLEIK

SEQ ID NO: 609 - protein, 112 aa, Mus musculus
DVVVTQTPLSLPVSFGDQVSISCRSSQSLANSYGVTYLSWYLHKPGQSPQLLIYGISNRFSGVPDRFSGSGSGTDFTLKISTIKPEDLGMYYCLQGTHQPWTFGGGTKLEIK

SEQ ID NO: 610 - protein, 112 aa, Mus musculus
DVVVTQTPLSLPVSFGDQVSISCTSSQSLANSYGNTYLSWYLHKPGQSPQLLIYGISNRFSGVPDRFSGSGSGTDFTLKISAIKPEDLGMYYCLQGTHQPPTFGGGTKLEIK

SEQ ID NO: 611 - protein, 107 aa, Mus musculus
DIQMNQSPSSLSASLGDTITITCHASQNINVWLSWYQQKPGNFPKLLIYKTSNLHTGVPSRFSGSGSGTGFTLTISNLQPEDIATYYCQQGQSYPWTFGGGTKLEIK

SEQ ID NO: 612 - protein, 107 aa, Mus musculus
DIVLTQSPATLSVTPGDSVSLSCRASPNIRNSLHWFQQKSHESPRLLISYASQSISGIPSRFSGSGSGTDFTLSINSLETEDFGMYFCQQSNSWPYTFGGGTKLEIK

SEQ ID NO: 613 - protein, 107 aa, Mus musculus
DIVLTQSPAILSVSPGERVSFSCRASQSIGTSIHWYQQRTNGSPRLLIKFASESISGIPSRFSGSGSGTDFTLSINSVESEDIGDYYCQQSNSWPYTFGGGTKLEIK

SEQ ID NO: 614 - protein, 107 aa, Mus musculus
DIVLTQSPATLSVTPGDSVSLSCRASQSIRNSLHWFQQKSHESPRLLINYVSQSISGIPSRFRGSGSGTDFTLTINSLETEDFGMYFCQQTNSWPYTFGGGTKLEIK

SEQ ID NO: 615 - protein, 112 aa, Mus musculus
NIMMTQSPSSLAVSAGEKVTMSCKSSQSVLYSSNQMNYLAWYQQKPGQSPKLLIYWASTRESGVPDRFTGSGSGTDFTLTISSVQSEDLALYYCHQYLSSLTFGAGTKLELK

SEQ ID NO: 616 - protein, 107 aa, Mus musculus
DIVLTQSPATLSVTPGDSVSLSCRASQSITNNLHWYQQKSHESPRLLIKYASQSISGIPSRFSGSGSGTDFTLSINSVETEDFGLYFCQQSNSWPYTFGGGTKLEIN

SEQ ID NO: 617 - protein, 112 aa, Mus musculus
DVVVTQTPLSLPVSFGDQVSISCRSSQSLANSYGNTYLSWYLHKPGQSPHLLIYGISNRFSGVPDRFSGSGSGTDFTLKISTIKPEDLGMYYCLQGTHQPWTFGGGTKLEIK

SEQ ID NO: 618 - protein, 112 aa, Mus musculus
DVVVTQTPLSLPVSFGDQVSISCRSSQSLANIYGNTYLSWYLHKPGQSPQLLIYGISNRFSGVPDRFSGSGSGTDFTLKISTIKPEDLGMYYCLQGTHQPWTFGGGTKLEIK

SEQ ID NO: 619 - protein, 107 aa, Mus musculus
DILLTQSPAILSVSPGERVSFSCRASQSVGTSIQWYQQRTNGSPRLLIKYGFESISGIPSRFSGSGSGTDFTLSINSVESEDSADYYCQQSYRWPYTFGGGSKLEIK

SEQ ID NO: 620 - protein, 107 aa, Mus musculus
DIQMTQTTSSLSASLGDRVTISCSASQGISNYLNWYQQKPDGTVTLLIYYTSSLHSGVPSRFSGSGSGTDYSLTISNLEPEDIATYFCQHYSKLPYTFGGGTKLEIK

SEQ ID NO: 621 - protein, 107 aa, Mus musculus
DIVLTQSPATLSVTPGDSVSLSCRASQSIRNNLHWFQQKSHESPRLLIKYVFQSISGIPSRFSGSGSGTDFTLSINSLETEDFGMYFCQQSNSWPYTFGGGTKLEIK

SEQ ID NO: 622 - protein, 108 aa, Mus musculus
EIVLTQSPAIMSASPGEKVTVTCSAGSSVSSSDLHWYQQKSGSSPRLLIYDTSKLASGVPVRFSGSGSGTSYALTISRMEAEDAATYYCQQWSSYPLTFGAGTKLELK

SEQ ID NO: 623 - protein, 112 aa, Mus musculus
DVLLTQTPLSLPVSLGDQASISCRSSQSIVHSNGNTYLEWYLQKPGQSPKLLIYKVSNRFSGVPDRFSGSGSGTDFTLKIRRVEAEDLGVYYCFQGSHVPGTFGGGTRLEIK

SEQ ID NO: 624 - protein, 107 aa, Mus musculus
DIVLTQSPATLSVTPGDSVSLSCRASQNIRNNLHWFQQKSHESPRLLIKYASQSISGIPSRFSGSGSGTDFTLSINSLETEDFGMFFCQQSNSWPYTFGGGTKLEIK

SEQ ID NO: 625 - protein, 108 aa, Mus musculus
EIVLTQSPAIMSASPGEKVTVTCSAGSSVSSRYFHWYQQKSGSSPRLLIYDTSKLASGVPVRFSGSGSGTSYALTISRMEAEDAATYYCQQWSSYPLTFGAGTKLELK

SEQ ID NO: 626 - protein, 107 aa, Mus musculus
DIVMTQSQKFMSTSVGDRVSVTCKASQNVHTNVAWYQQKPGQSPKTLIYSASYRYSGVPDRFTGSGSGTDFTLTISNVQSEDLAEYFCQQYNSYPYTFGGGTKLEIK

SEQ ID NO: 627 - protein, 112 aa, Mus musculus
DVVVTQTPLSLPVSFGDQVSISCRSSQSLANSYGNTYLSWYLHKPGQSPQLLIYGISNRFSGVPDRFSGSGSGTDFTLTISTIKPEDLGMYYCLQGTHLPWTFGGGTKLEIK

SEQ ID NO: 628 - protein, 112 aa, Mus musculus
DVVMTQTPLSLPVSFGDQVSISCRSSQSLANSYGNTYLSWYLYKPGQSPHLLIYGISNRFSGVPDRFSGSGSGTDFTLKISTIKPEDLGMYYCLQGTHQPWTFGGGTKLEIK

SEQ ID NO: 629 - protein, 107 aa, Mus musculus
DIVMTQSQKFMSTSVGDRVSVTCKASQNVGTNVAWYQQKPGQSPKVLIYSASYRYSGVPDRFTGSGSGTDFTLTISNVQSEDLAEYFCQQYNSYPLTFGAGTKLELK

SEQ ID NO: 630 - protein, 106 aa, Mus musculus
QIVLTQSPVIMSASPGEKVTMTCSATSSVSSMHWYQQKSGTSPKRWIYDTSKLASGVPIRFSGSGSGTSYSLTISSMEAEDAATYYCQQWSSNPSTFGAGTKLELK

SEQ ID NO: 631 - protein, 112 aa, Mus musculus
DVVMTQTPLSLPVSFGDQVSISCRSSQSLANSYGNTYLSWYLHKPGQSPHLLIYGISNRFSGVPDRFSGSGSGTDFTLKISTIKPEDLGMYYCLQGIHQPWTFGGGTKLEIK

SEQ ID NO: 632 - protein, 107 aa, Mus musculus
DIQMNQSPSSLSASLGDTITITCHASQNINVWLSWYQQKPGNIPKLLIYKASTLHTGVPSRFSGSGSGTGFTLNISSLQPEDIATYYCQQGQSYPWTFGGGTKLEIK

SEQ ID NO: 633 - protein, 107 aa, Mus musculus
DIQMTQTTSSLSASLGDRVTISCSASQGISNYLNWYQQKPDGTVTLLIYYTSTLHSGVPSRFSGSGSGTEYSLTISSLEPEDIATYYCQHYSKLPYTFGGGTKLEIK

SEQ ID NO: 634 - protein, 107 aa, Mus musculus
DIKMTQSPSSTYASLGERVTITCKASQDIKSYLSWFQQKPWKSPKTLIYYATRLADGVPSRFSGSGSGQDYSLTISSLESDDTATYYCLHHGERPYTFGGGTKLEIK

SEQ ID NO: 635 - protein, 112 aa, Mus musculus
DVVVTQTPLSLPVSFGDQVSISCRSSQSLANSYGSTYLSWYLHKPGQSPQLLIYGISNRFSGVPDRFSGSGSGTDFTLKISTIKPEDLGMYYCLQGTHQPPTFGGGTKLEIK

SEQ ID NO: 636 - protein, 107 aa, Mus musculus
DIQMNQSPSSLSASLGDTITITCHASQNINVWLNWYQQKPGNIPKLLIYKASNLHTGVPLRFSGSGSGTGFTLTISSLQPEDIATYYCQQGQSYPWTFGGGTKLEIK

SEQ ID NO: 637 - protein, 107 aa, Mus musculus
DIVLTQSPATLSVTPRNSVSLSCRASQSIRNNLHWYQQKSHGSPRLLIKYVSQSISGIPSRFSGSGSGTDFTLSINSVETEDFGMYFCQQSNSWPYTFGGGTKLEIN

SEQ ID NO: 638 - protein, 108 aa, Mus musculus
ENVLTQSPAIMSASPGEKVTMTCRASSSVSSSYLHWYQQKSGASPKLWIYSTSNLASGVPARFSGSGSGTSYSLTISSVEAEDAATYYCQQYSGYPLTFGGGTKLEIK

SEQ ID NO: 639 - protein, 112 aa, Mus musculus
DVVVTQTPLSLPVSFGDQVSISCRSSQSLTNSYGDTYLSWYLHKPGQSPQLLIYGISNRFSGVPDRFSGSGSGTDFTLKISTIKPEDLGMYYCLQGTHQPWTFGGGTKLEIK

SEQ ID NO: 640 - protein, 107 aa, Mus musculus
DIQMTQSSSYLSVSLGGRVTITCKASDHINNWLAWYQQKPGNAPRLLISGATSLETGVPSRFSGSGSGKDYTLIITSLQTEDVATYYCQQYWSTPLTFGAGTKLELK

SEQ ID NO: 641 - protein, 107 aa, Mus musculus
DIQMTQSPASLSASVGETVTITCGASEHIYGALNWYQRKQGKSPQLLIYGATNLADGMSSRFSGSGSGRQYSLKISSLHPDDVATYYCQNVLSTPLTFGAGTKLELK

SEQ ID NO: 642 - protein, 111 aa, Mus musculus
DIVLTQSPASLAVSLGQRATISCRASKSVSTSGYSYMHWYQQKPGQPPKLLIYLASNLESGVPARFSGSGSGTDFTLNIHPVEEEDAATYYCQHSRELPWTFGGGTKLEIK

SEQ ID NO: 643 - protein, 107 aa, Mus musculus
DIQMTQSSSYLSVSLGGRVTITCKASDHINNWLAWYQQKPGNAPRLLISGASRLETGVPSRFSGSGSGKDYTLTITSLQTEDVATYYCQQYWSTPWTFGGGTKLEIK

SEQ ID NO: 644 - protein, 107 aa, Mus musculus
DIQMNQSPSSLSASLGDTITITCHASQNINVWLSWYQQKPGNITKLLIYKASNLHTGVPSRFSGSGSGTGFTLTISSLQPEDIATYYCQQGQSYPRTFGGGTKLEIK

SEQ ID NO: 645 - protein, 107 aa, Mus musculus
DIQMTQSSSYLSVSLGGRVTITCKASDHINNWLAWYQQKPGNAPRLLISGATSLETGVPSRFSGSGSGKDYTLSITSLQTEDVATYYCQQYWSTPFTFGSGTKLEIK

SEQ ID NO: 646 - protein, 113 aa, Mus musculus
DIVMSQSPSSLTVSVGEKVTMSCKSSQSLLYSGNQKNYLAWYQQKPGQSPKLLIYWASTRESGVPDRFTGSGSGADFTLTINNMKAEDLAIYYCQQYYSYPWTFGGGTKLEIK

SEQ ID NO: 647 - protein, 107 aa, Mus musculus
DIQMTQTTSSLSASLGDRVTISCRSSQDISNYLNWYQQKPDGTVKLLIYYTSRLHSGVPSRFSGSGSGTDYSLTISNLEQEDIATYFCQQGNTLPFTFGTGTKLELK

SEQ ID NO: 648 - protein, 107 aa, Mus musculus
DIQMTQSPSSLSASLGERVTLTCRAGQEISGFLSWLQQKPDGTIKRLIYAASTLDSGVPKRFSGRRSGSDYSLTISSLESEDFADYYCLQYASYPPTFGGGTKLEIK

SEQ ID NO: 649 - protein, 112 aa, Mus musculus
DVVVTQTPLSLPVSFGDQVSISCRSSQSLANSYGSTYLSWYLHKPGQSPQLLIYGISNRFSGVPDRFSGSGSGTDFTLKISTIEPEDLGMYYCLQYTHQPPTFGGGTKLEIK

SEQ ID NO: 650 - protein, 112 aa, Mus musculus
DVVVTQTPLSLPVSFGDQVSISCRSSQSLANSYGDTYLSWYLHKPGQSPQLLIYGISNRFSGVPDRFSGSGSGTDFTLKISTIKPEDLGMYYCLQGTHQPWTFGGGTKLEIK

SEQ ID NO: 651 - protein, 107 aa, Mus musculus
DIQMTQSSSYLSVSLGGRVTITCKASDHINNWLAWYQQKPGNAPRLLISGASRLETGVPSRFSGSGSGRDYTLTITSLQTEDVATYYCQQYWSTPWTFGGGTKLEIK

SEQ ID NO: 652 - protein, 112 aa, Mus musculus
DVVVTQTPLSLPVSFGDQVSISCRSSQSLTNSYGNTYLSWYLHKPGQSPQLLIYGISNRFSGVPDRFSGSGSGTDFTLKISTIKPEDLGMYYCLQGTHQPWTFGGGTKLEIK

SEQ ID NO: 653 - protein, 107 aa, Mus musculus
DIQMTQSSSYLSVSLGGRVTITCKASDHINNWLAWYQQKPGNAPRLLISGATSLETGVPSRFSGSGSGKDYTLSITSLQTEDVATYYCQQYWSTPLTFGAGTKLELK

SEQ ID NO: 654 - protein, 107 aa, Mus musculus
DIQMTQSPSSLSASLGEGVTLTCRAGQEITGFLSWLQQKPDGTIKRLIYAASTLDSGVPKRFSGRRSGSDYSLTISSLESEDFADYYCLQYASYPPTFGGGTKLEIK

SEQ ID NO: 655 - protein, 107 aa, Mus musculus
DIQMTQSSSYLSVSLGGRVTITCKASDHINNWLAWYQQKPGNAPRLLISGATSLETGVPSRFSGSGSGKDYTLTITSLQTEDVATYYCQQYWSTPWTFGGGTKLEIK

SEQ ID NO: 656 - protein, 107 aa, Mus musculus
DIQMTQTTSSLSASLGDRVTISCRASQDISNYLNWYQQKPDGTVKLLIYYTSRLHSGVPSRFSGSGSGTDFSLTISNLDQEDIATYFCQQGNTLPFTFGVGTKLELK

SEQ ID NO: 657 - protein, 112 aa, Mus musculus
DVVLTQTPLSLPVSFGDQVSISCRSSQSLANSYGNTYLSWYLHKPGQSPQLLIYEISNRFSGVPDRFSGSGSGTDFTLKISTIKPEDLGMYYCLQGTHQPPTFGGGTKLEIK

SEQ ID NO: 658 - protein, 112 aa, Mus musculus
DVVVTQTPLSLPVSFGDQVSISCRSSQSLANSYGKTYLSWYLHKPGQSPQLLIYGISHRFSGVPDRFSGSGSGTDFTLRISTIKPEDLGMYYCLQGTHQPPTFGGGTKLEIK

SEQ ID NO: 659 - protein, 107 aa, Mus musculus
DIQMTQSSSYLSVSLGGRVTITCKASDHINNWLAWYQQKPGNAPRLLISGATSLETGVPSRFSGSGSGKDYTLSIISLQTEDVATYYCQQYWSTPLTFGAGTKLELK

SEQ ID NO: 660 - protein, 107 aa, Mus musculus
DIQMTQSSSYLPVSLGGRVTITCKASDHINSWLAWYQQKPGNAPRLLISGTTSLETGIPSRFSGSGSGKDYTLTITSLQTEDVATYYCQQYWSTPWTFGGGTKLEIK

SEQ ID NO: 661 - protein, 113 aa, Mus musculus
DIVMTQSPSSLSVSAGEKVTMSCKSSQSLLNSGNQKNYLAWYQQKPGQPPKLLIYGASTRESGVPDRFTGSGSGTDFTLTIGSVQAEDLAVYYCQNYHSYPFTFGSGTKLEIK

SEQ ID NO: 662 - protein, 107 aa, Mus musculus
ETTVTQSPASLSVATGEKVTIRCITSTDIDDDMNWYQQKPGEPPKLLISEGNTLRPGVPSRFSSSGYGTDFVFTIENTLSEDVADYYCLQSDNMPYTFGGGTKLEIK

SEQ ID NO: 663 - protein, 107 aa, Mus musculus
DIVMTQSHKFMSTSVGDRVSITCKASQDVSTTVAWYQQKPGQSPKPLIYSASYRYTGVPDRFTGSGSGTDFTFTISSVQAEDLAVYYCQQHYSVPWTFGGGTKLEIK

SEQ ID NO: 664 - protein, 113 aa, Mus musculus
DIVMTQSPSSLSVSAGEKVTMSCKSSQSLLNSGNQKNYLAWYQQKPGQPPKLLIYGASTRESGVPDRFTGSGSGTDFTLTISSVQAEDLAVYYCQNYHSYPFTFGSGTKLEVK

SEQ ID NO: 665 - protein, 107 aa, Mus musculus
DIQMNQSPSSLSASLGDTITITCHASQNINVWLSWYQQKPGNIPKLLIYKASNLHTGVPSRFSGSGSGTGFTLTISSLQPEDIATYYCQQGQSYPYTFGGGTKLEIK

SEQ ID NO: 666 - protein, 108 aa, Mus musculus
ENVLTQSPAIMSASPGEKVTMTCRASSSVSSSYLHWYQQKSGASPKLWIYTTSKLASGVPARFSGSGSGTSYSLTISSVEAEDAATYYCQQYSGYPLTFGGGTKLEIK

SEQ ID NO: 667 - protein, 106 aa, Mus musculus
EILLTQSPAIIAASPGEKVTITCSASSSVSYMNWYQQKPGSSPKIWIYGISNLASGVPARFSGSGSGTSFSFTINSMEAEDVATYYCQQISSYPLTFGAGTKLELK

SEQ ID NO: 668 - protein, 112 aa, Mus musculus
DVVVTQTPLSLPVSFGDQVSISCRSSQSLENSYGNTYLSWYLHKPGQSPQLLIYGISNRFSGVPDRFSGSGSGTDFTLKISTIKPEDLGMYYCLQGTHQPPTFGGGTKLEIK

SEQ ID NO: 669 - protein, 112 aa, Mus musculus
DVVVTQTPLSLPVSFGDQVSISCRSSQSLANSYGNTYLSWYLHKPGQSPQLLIYGISNRFSGVPDRFSGSGSGTDFTLKISTIKPEDLGLYYCLQGTHLPLTFGAGTKLELK

SEQ ID NO: 670 - protein, 112 aa, Mus musculus
DVVVTQTPLSLPVSFGDQVSISCRSSQSLANSYGNTFLSWYLHKPGQSPQLLIYGISNRFSGVPDRFSGSGSGTDFTLKISSIKPEDLGMYFCLQGTHQPWTFGGGTMLEIK

SEQ ID NO: 671 - protein, 112 aa, Mus musculus
DVVMTQSPLSLPVSFGDQVSISCRSSQSLANSYGDTFLSWYLHKPGQSPQLLIYGISNRFSGVPDRFSGSGSGTDFTLKISTIKPEDLGMYYCLQGTHQPPTFGGGTKLEIK

SEQ ID NO: 672 - protein, 107 aa, Mus musculus
DIQMTQSPASLSVSVGETVTITCRASENIYSNLAWYQQKQGKSPQLLVYAATNLVDGVPSRFSGSGSGTQYSLKINSLQSEDFGSYYCQHFWGTPYTFGGGTKLEIK

SEQ ID NO: 673 - protein, 107 aa, Mus musculus
DIQMNQSPSSLSASLGDTITITCHASQNINVWLSWYQQKPGNISKLLIYKASNFHTGVPSRFSGSGSGTNFTLTISSLQPEDIATYYCQQGQTYPFTFGGGTKLEIK

SEQ ID NO: 674 - protein, 106 aa, Mus musculus
EILLTQSPAIIAASPGEKVTITCSASSSVSYMNWYQQKPGSSPKIWIYGISNLASGVPARFSGSGSGTSFSFTINSMEAEDVATYYCQQRSSFPPTFGGGTKLEIK

SEQ ID NO: 675 - protein, 107 aa, Mus musculus
DIQMTQTTSSLSASLGDRVTISCRASQDISNYLNWYQQKPDGTVKLLIYYTSRLHSGVPSRFSGSGSGTDYSLTISNLEQEDIATYFCQQGNTLPFTFGAGTKLELK

SEQ ID NO: 676 - protein, 113 aa, Mus musculus
DIVMTQSPSSLSVSAGEKVTMSCKSSQSLLNSGNQKKYLAWYQQKPGQPPKLLIYGASTRESGVPDRFTGSGSGTDFTLTISSVQAEDLAVYYCQNYHRFPFTFGSGTKLEIK

SEQ ID NO: 677 - protein, 107 aa, Mus musculus
DIQMTQSPASQSASLGESVTITCLASQTIGTWLAWYQQKPGKSPQLLIYAATSLADGVPSRFSGSGSGTKFSFKISSLQAEDFVSYYCQQLYNTPLTFGAGTKLELK

SEQ ID NO: 678 - protein, 112 aa, Mus musculus
DVVMTQTPLTLSVTIGQPASISCKSSQSLLDSDGKTYLNWLLQRPGQSPKRLIYLVSKLDSGVPDRFTGSGSGTDFTLKISRVEAEDLGIYYCWQGTHFPQTFGGGTKLEIK

SEQ ID NO: 679 - protein, 107 aa, Mus musculus
DIQMTQSSSYLSVSLGGRVTITCKASDHINNWLAWYQQKPGNAPRLLISGATSLETGIPSRFSGSGSGKDYTLSITSLQTEDVATYYCQQYWSTPFTFGSGTKLEIK

SEQ ID NO: 680 - protein, 107 aa, Mus musculus
DIQMTQSPSSLSASLGERVSLTCRASQEISGFLSWLQQKPDGTIKRLIYAASTLDSGVPKRFSGTRSGSDYSLTISSLESEDFADYYCLQYASYPPTFGGGTKLEIR

SEQ ID NO: 681 - protein, 107 aa, Mus musculus
DIQMTQSSSSFSVSLGDRVTITCKASEDIYNRLAWYQQKPGNAPRLLISGATSLETGVPSRFSGSGSGKDYTLSITSLQTEDVATYYCQQYWSTPWTFGGGTKLEIK

SEQ ID NO: 682 - protein, 107 aa, Mus musculus
DIQMTQSPASQSASLGESVTITCLASQTIGTWLAWYQQKPGKSPQLLIYAATSLADGVPSRFSGSGSGTKFSFKISSLQAEDFVSYYCQQLYSTPLTFGAGTKLELK

SEQ ID NO: 683 - protein, 107 aa, Mus musculus
DIQMTQSPASQSASLGESVTITCLASQTIGTWLAWYQQKPGKSPQLLIYAATSLADGVPSRFSGSGSGTKFSFKISSLQAEDFVSYYCQQLYSTPLTFGAGTKLELI

SEQ ID NO: 684 - protein, 107 aa, Mus musculus
DIVMTQSHKFMSTSVGDRVSITCKASQDVSTTVAWYQQKPGQSPKPLIYSASYRYTGVPDRFTGSGSGTDFTFTISSVQAEDLAVYYCQQHYSVPWTFGGGTKLEIN

SEQ ID NO: 685 - protein, 106 aa, Mus musculus
EILLTQSPAIIAASPGVKVTITCSASSSVRYMNWYQQKPGSPPKIWIYGISNLASGVPARFSGSGSGTSFSFTINSMEAEDVATYYCQQTSSYPLTFGAGTKLELK

SEQ ID NO: 686 - protein, 107 aa, Mus musculus
DIVMTQSHKFMSTSVGDRVSITCKASQDVSTAVAWYQQKPGQSPKLLIYSASYRYTGVPDRFTGSGSGTDFTFTINSVQAEDLAVYYCQQHYSSPWTFGGGTKLEIK

SEQ ID NO: 687 - protein, 8 aa, Mus musculus
GYAFTNYL

SEQ ID NO: 688 - protein, 8 aa, Mus musculus
INPGSGGS

SEQ ID NO: 689 - protein, 14 aa, Mus musculus
ARTGVYGNFLIFDY

SEQ ID NO: 690 - protein, 12 aa, Mus musculus
QSLLNSGIQKNY

SEQ ID NO: 691 - protein, 3 aa, Mus musculus
GAS

SEQ ID NO: 692 - protein, 9 aa, Mus musculus
QNDHRYPFT

SEQ ID NO: 693 - protein, 10 aa, Mus musculus
GYSITNGNHW

SEQ ID NO: 694 - protein, 7 aa, Mus musculus
ITSSGRT

SEQ ID NO: 695 - protein, 10 aa, Mus musculus
AREGGWLPPV

SEQ ID NO: 696 - protein, 11 aa, Mus musculus
QSLLDSDGKTY

SEQ ID NO: 697 - protein, 3 aa, Mus musculus
LVS

SEQ ID NO: 698 - protein, 9 aa, Mus musculus
WQGTHFPYT

SEQ ID NO: 699 - protein, 8 aa, Mus musculus
GFTFTDHY

SEQ ID NO: 700 - protein, 10 aa, Mus musculus
IRNKVNGYTT

SEQ ID NO: 701 - protein, 12 aa, Mus musculus
ARYIPYYDPFDY

SEQ ID NO: 702 - protein, 6 aa, Mus musculus
QDINSY

SEQ ID NO: 703 - protein, 3 aa, Mus musculus
RAN

SEQ ID NO: 704 - protein, 8 aa, Mus musculus
LQYDELYT

SEQ ID NO: 705 - protein, 10 aa, Mus musculus
SREGGWLPPV

SEQ ID NO: 706 - protein, 8 aa, Mus musculus
GYTFTDYY

SEQ ID NO: 707 - protein, 8 aa, Mus musculus
INPYNGGT

SEQ ID NO: 708 - protein, 6 aa, Mus musculus
AREGTD

SEQ ID NO: 709 - protein, 9 aa, Mus musculus
WQGTHFPWT

SEQ ID NO: 710 - protein, 7 aa, Mus musculus
ISSSGRI

SEQ ID NO: 711 - protein, 8 aa, Mus musculus
GFTFSNYG

SEQ ID NO: 712 - protein, 8 aa, Mus musculus
ISTGGSYT

SEQ ID NO: 713 - protein, 16 aa, Mus musculus
ARPHYYGSSSGNYFDY

SEQ ID NO: 714 - protein, 6 aa, Mus musculus
EDIYNR

SEQ ID NO: 715 - protein, 3 aa, Mus musculus
GAT

SEQ ID NO: 716 - protein, 9 aa, Mus musculus
QQYWSTPWT

SEQ ID NO: 717 - protein, 10 aa, Mus musculus
GYSITHGNHW

SEQ ID NO: 718 - protein, 7 aa, Mus musculus
IRSSGST

SEQ ID NO: 719 - protein, 3 aa, Mus musculus
LLS

SEQ ID NO: 720 - protein, 8 aa, Mus musculus
GFSLTSYV

SEQ ID NO: 721 - protein, 7 aa, Mus musculus
IWTGGGT

SEQ ID NO: 722 - protein, 15 aa, Mus musculus
ARTRAYYSNWGYFDV

SEQ ID NO: 723 - protein, 12 aa, Mus musculus
QSVLYSSNQKNY

SEQ ID NO: 724 - protein, 3 aa, Mus musculus
WAS

SEQ ID NO: 725 - protein, 8 aa, Mus musculus
HQYLSSYT

SEQ ID NO: 726 - protein, 7 aa, Mus musculus
ISSSGRT

SEQ ID NO: 727 - protein, 9 aa, Mus musculus
GYSITSGYY

SEQ ID NO: 728 - protein, 7 aa, Mus musculus
ISYDGSN

SEQ ID NO: 729 - protein, 14 aa, Mus musculus
ARGLYYDYDDYFDY

SEQ ID NO: 730 - protein, 6 aa, Mus musculus
QDINKY

SEQ ID NO: 731 - protein, 3 aa, Mus musculus
YTS

SEQ ID NO: 732 - protein, 8 aa, Mus musculus
LQYDNLWT

SEQ ID NO: 733 - protein, 10 aa, Mus musculus
TREGGWLPPV

SEQ ID NO: 734 - protein, 7 aa, Mus musculus
ITSSGRI

SEQ ID NO: 735 - protein, 11 aa, Mus musculus
QSLFDSDGKTY

SEQ ID NO: 736 - protein, 7 aa, Mus musculus
ISSSGST

SEQ ID NO: 737 - protein, 11 aa, Mus musculus
QSLLDIDGKTY

SEQ ID NO: 738 - protein, 8 aa, Mus musculus
GYTFTTYG

SEQ ID NO: 739 - protein, 8 aa, Mus musculus
INTYSGVP

SEQ ID NO: 740 - protein, 11 aa, Mus musculus
ARYDYDVGFAY

SEQ ID NO: 741 - protein, 11 aa, Mus musculus
QSLVHSNGNTY

SEQ ID NO: 742 - protein, 3 aa, Mus musculus
KIS

SEQ ID NO: 743 - protein, 8 aa, Mus musculus
SQSTHVPA

SEQ ID NO: 744 - protein, 8 aa, Mus musculus
INTFSRVP

SEQ ID NO: 745 - protein, 3 aa, Mus musculus
KVS

SEQ ID NO: 746 - protein, 8 aa, Mus musculus
SQSTHVPT

SEQ ID NO: 747 - protein, 10 aa, Mus musculus
GISITTGNYK

SEQ ID NO: 748 - protein, 7 aa, Mus musculus
IYYSGTI

SEQ ID NO: 749 - protein, 11 aa, Mus musculus
ARETVLRVFDY

SEQ ID NO: 750 - protein, 6 aa, Mus musculus
QDVGTA

SEQ ID NO: 751 - protein, 3 aa, Mus musculus
SAS

SEQ ID NO: 752 - protein, 9 aa, Mus musculus
QQHYSSPRT

SEQ ID NO: 753 - protein, 10 aa, Mus musculus
GYSITNGHHW

SEQ ID NO: 754 - protein, 8 aa, Mus musculus
GYTFTDHT

SEQ ID NO: 755 - protein, 8 aa, Mus musculus
IYPRDGST

SEQ ID NO: 756 - protein, 11 aa, Mus musculus
ARRVVASGMDY

SEQ ID NO: 757 - protein, 6 aa, Mus musculus
QDVSTA

SEQ ID NO: 758 - protein, 9 aa, Mus musculus
QQHYSTPYT

SEQ ID NO: 759 - protein, 11 aa, Mus musculus
QSLLDRDGKTY

SEQ ID NO: 760 - protein, 10 aa, Mus musculus
GYSITSGNHW

SEQ ID NO: 761 - protein, 8 aa, Mus musculus
IFPGSGST

SEQ ID NO: 762 - protein, 5 aa, Mus musculus
ARFTV

SEQ ID NO: 763 - protein, 9 aa, Mus musculus
WQGTHFPHT

SEQ ID NO: 764 - protein, 8 aa, Mus musculus
IYPGSGNT

SEQ ID NO: 765 - protein, 12 aa, Mus musculus
ARVTYYGGYFDY

SEQ ID NO: 766 - protein, 6 aa, Mus musculus
QDISNY

SEQ ID NO: 767 - protein, 9 aa, Mus musculus
QQGNTLPFT

SEQ ID NO: 768 - protein, 8 aa, Mus musculus
GYILSGYW

SEQ ID NO: 769 - protein, 13 aa, Mus musculus
ARIRITTVPYFDF

SEQ ID NO: 770 - protein, 6 aa, Mus musculus
QDVSKA

SEQ ID NO: 771 - protein, 9 aa, Mus musculus
QQHYSTPWT

SEQ ID NO: 772 - protein, 8 aa, Mus musculus
GYTFTSYW

SEQ ID NO: 773 - protein, 8 aa, Mus musculus
INPSNGVT

SEQ ID NO: 774 - protein, 9 aa, Mus musculus
ARDYDYFDY

SEQ ID NO: 775 - protein, 6 aa, Mus musculus
VNIHNY

SEQ ID NO: 776 - protein, 3 aa, Mus musculus
NAK

SEQ ID NO: 777 - protein, 9 aa, Mus musculus
QHFWSTPYT

SEQ ID NO: 778 - protein, 9 aa, Mus musculus
GYSITSAYY

SEQ ID NO: 779 - protein, 7 aa, Mus musculus
ISYDGTN

SEQ ID NO: 780 - protein, 9 aa, Mus musculus
GRGRPFVPY

SEQ ID NO: 781 - protein, 6 aa, Mus musculus
QNVGSN

SEQ ID NO: 782 - protein, 9 aa, Mus musculus
QQYNNYPFT

SEQ ID NO: 783 - protein, 10 aa, Mus musculus
ARRALPYFDC

SEQ ID NO: 784 - protein, 6 aa, Mus musculus
QDVFTA

SEQ ID NO: 785 - protein, 9 aa, Mus musculus
QQHYSTPLT

SEQ ID NO: 786 - protein, 12 aa, Mus musculus
QSLLNSGVQKNY

SEQ ID NO: 787 - protein, 14 aa, Mus musculus
ARTGVYANFLIFDY

SEQ ID NO: 788 - protein, 8 aa, Mus musculus
INPSNGGT

SEQ ID NO: 789 - protein, 14 aa, Mus musculus
ARRTTVLAGPYFDY

SEQ ID NO: 790 - protein, 6 aa, Mus musculus
QNINVW

SEQ ID NO: 791 - protein, 3 aa, Mus musculus
KAS

SEQ ID NO: 792 - protein, 9 aa, Mus musculus
QQGQSYPLT

SEQ ID NO: 793 - protein, 11 aa, Mus musculus
QSLLDSDGQTY

SEQ ID NO: 794 - protein, 10 aa, Mus musculus
AREGGRLPPV

SEQ ID NO: 795 - protein, 10 aa, Mus musculus
GYSISNGNHW

SEQ ID NO: 796 - protein, 8 aa, Mus musculus
GFTFSRYI

SEQ ID NO: 797 - protein, 8 aa, Mus musculus
ISGGGGNT

SEQ ID NO: 798 - protein, 12 aa, Mus musculus
ARWLPSYYAMDY

SEQ ID NO: 799 - protein, 6 aa, Mus musculus
QDIGSS

SEQ ID NO: 800 - protein, 3 aa, Mus musculus
ATS

SEQ ID NO: 801 - protein, 9 aa, Mus musculus
LQYASSPWT

SEQ ID NO: 802 - protein, 6 aa, Mus musculus
QNINIW

SEQ ID NO: 803 - protein, 9 aa, Mus musculus
QQGQSYPYT

SEQ ID NO: 804 - protein, 8 aa, Mus musculus
GFTFSSYT

SEQ ID NO: 805 - protein, 12 aa, Mus musculus
ARWLLTYYAMDY

SEQ ID NO: 806 - protein, 9 aa, Mus musculus
LQYVSCPWT

SEQ ID NO: 807 - protein, 8 aa, Mus musculus
GYTFTDCY

SEQ ID NO: 808 - protein, 8 aa, Mus musculus
IFPGSDFT

SEQ ID NO: 809 - protein, 11 aa, Mus musculus
ARYGLGHYFDY

SEQ ID NO: 810 - protein, 8 aa, Mus musculus
GYTFTAYC

SEQ ID NO: 811 - protein, 10 aa, Mus musculus
SREGGWFPPV

SEQ ID NO: 812 - protein, 3 aa, Mus musculus
QAS

SEQ ID NO: 813 - protein, 8 aa, Mus musculus
GFTFSSYG

SEQ ID NO: 814 - protein, 8 aa, Mus musculus
ISSGGSYT

SEQ ID NO: 815 - protein, 17 aa, Mus musculus
ARHHYYYGSSYIFYFDV

SEQ ID NO: 816 - protein, 8 aa, Mus musculus
HQYLSSLT

SEQ ID NO: 817 - protein, 8 aa, Mus musculus
ISGRGGNT

SEQ ID NO: 818 - protein, 12 aa, Mus musculus
VRWLLTYYAMDY

SEQ ID NO: 819 - protein, 12 aa, Mus musculus
ARWLPTYYAMDY

SEQ ID NO: 820 - protein, 8 aa, Mus musculus
GYSFTTYG

SEQ ID NO: 821 - protein, 7 aa, Mus musculus
IRSSGRT

SEQ ID NO: 822 - protein, 11 aa, Mus musculus
QSLLDGDGRTY

SEQ ID NO: 823 - protein, 10 aa, Mus musculus
TREGGRLPPV

SEQ ID NO: 824 - protein, 10 aa, Mus musculus
AREGGWFPPV

SEQ ID NO: 825 - protein, 10 aa, Mus musculus
GYSIINGNHW

SEQ ID NO: 826 - protein, 10 aa, Mus musculus
GYSITTGNHW

SEQ ID NO: 827 - protein, 10 aa, Mus musculus
TREGGLFPPV

SEQ ID NO: 828 - protein, 7 aa, Mus musculus
ITSNGRT

SEQ ID NO: 829 - protein, 8 aa, Mus musculus
ITGGGGNT

SEQ ID NO: 830 - protein, 3 aa, Mus musculus
ATY

SEQ ID NO: 831 - protein, 9 aa, Mus musculus
LLYVNSPWT

SEQ ID NO: 832 - protein, 11 aa, Mus musculus
QSLLDSDGRTY

SEQ ID NO: 833 - protein, 8 aa, Mus musculus
IFPGSDNT

SEQ ID NO: 834 - protein, 3 aa, Mus musculus
TTS

SEQ ID NO: 835 - protein, 8 aa, Mus musculus
FYPGGGST

SEQ ID NO: 836 - protein, 12 aa, Mus musculus
ARSYSNYVRFAY

SEQ ID NO: 837 - protein, 9 aa, Mus musculus
QQHYNTPLT

SEQ ID NO: 838 - protein, 8 aa, Mus musculus
GHTFTDYY

SEQ ID NO: 839 - protein, 8 aa, Mus musculus
IFPGSGNT

SEQ ID NO: 840 - protein, 11 aa, Mus musculus
AGYGLGHYFDN

SEQ ID NO: 841 - protein, 7 aa, Mus musculus
SSISSSN

SEQ ID NO: 842 - protein, 3 aa, Mus musculus
GTS

SEQ ID NO: 843 - protein, 9 aa, Mus musculus
QQWSSYPLT

SEQ ID NO: 844 - protein, 10 aa, Mus musculus
GYSITNGKHW

SEQ ID NO: 845 - protein, 11 aa, Mus musculus
QSLLDGDGKTY

SEQ ID NO: 846 - protein, 7 aa, Mus musculus
IRSSGGT

SEQ ID NO: 847 - protein, 10 aa, Mus musculus
DYSITNGNHW

SEQ ID NO: 848 - protein, 10 aa, Mus musculus
AREGGLLPPV

SEQ ID NO: 849 - protein, 10 aa, Mus musculus
TREGGWFPPV

SEQ ID NO: 850 - protein, 8 aa, Mus musculus
GYSFTGYI

SEQ ID NO: 851 - protein, 8 aa, Mus musculus
IVPYTGGT

SEQ ID NO: 852 - protein, 12 aa, Mus musculus
ARQLRGYFAMDY

SEQ ID NO: 853 - protein, 11 aa, Mus musculus
QSLANSYGNTY

SEQ ID NO: 854 - protein, 3 aa, Mus musculus
GIS

SEQ ID NO: 855 - protein, 9 aa, Mus musculus
LQGTHQPWT

SEQ ID NO: 856 - protein, 8 aa, Mus musculus
GFSLTRHG

SEQ ID NO: 857 - protein, 7 aa, Mus musculus
IWPGGNT

SEQ ID NO: 858 - protein, 16 aa, Mus musculus
ARSGGYGNFAPYYFDQ

SEQ ID NO: 859 - protein, 6 aa, Mus musculus
QEISGY

SEQ ID NO: 860 - protein, 3 aa, Mus musculus
AAS

SEQ ID NO: 861 - protein, 9 aa, Mus musculus
LQYASYPRT

SEQ ID NO: 862 - protein, 8 aa, Mus musculus
GYTFTNYG

SEQ ID NO: 863 - protein, 8 aa, Mus musculus
INTYTGES

SEQ ID NO: 864 - protein, 7 aa, Mus musculus
ARDSFAY

SEQ ID NO: 865 - protein, 11 aa, Mus musculus
KNLLHSNGITY

SEQ ID NO: 866 - protein, 3 aa, Mus musculus
RMS

SEQ ID NO: 867 - protein, 9 aa, Mus musculus
GQLLELPYT

SEQ ID NO: 868 - protein, 8 aa, Mus musculus
GYSFTDYN

SEQ ID NO: 869 - protein, 8 aa, Mus musculus
IDVYYSGT

SEQ ID NO: 870 - protein, 11 aa, Mus musculus
ARSLLRWYFDV

SEQ ID NO: 871 - protein, 7 aa, Mus musculus
SSVSSSY

SEQ ID NO: 872 - protein, 3 aa, Mus musculus
DTS

SEQ ID NO: 873 - protein, 10 aa, Mus musculus
GFSLSTSGIG

SEQ ID NO: 874 - protein, 7 aa, Mus musculus
IWWDDDN

SEQ ID NO: 875 - protein, 11 aa, Mus musculus
AQSGGITLMDY

SEQ ID NO: 876 - protein, 11 aa, Mus musculus
QSIVHSDGNTY

SEQ ID NO: 877 - protein, 9 aa, Mus musculus
FQSSHVPGT

SEQ ID NO: 878 - protein, 8 aa, Mus musculus
GYSFTGYT

SEQ ID NO: 879 - protein, 8 aa, Mus musculus
IVPSNGGT

SEQ ID NO: 880 - protein, 10 aa, Mus musculus
ARSLRFSFDY

SEQ ID NO: 881 - protein, 11 aa, Mus musculus
QSLANSYGTTY

SEQ ID NO: 882 - protein, 9 aa, Mus musculus
LQGTHQPPT

SEQ ID NO: 883 - protein, 8 aa, Mus musculus
GYTFTDYS

SEQ ID NO: 884 - protein, 8 aa, Mus musculus
INTETGVP

SEQ ID NO: 885 - protein, 14 aa, Mus musculus
ARTDYGNPYWYFDV

SEQ ID NO: 886 - protein, 5 aa, Mus musculus
SSVSD

SEQ ID NO: 887 - protein, 9 aa, Mus musculus
QQWSFNPQT

SEQ ID NO: 888 - protein, 8 aa, Mus musculus
IIPYNGGT

SEQ ID NO: 889 - protein, 12 aa, Mus musculus
ARGFRGYFAVDY

SEQ ID NO: 890 - protein, 11 aa, Mus musculus
QSLTNSYGDTY

SEQ ID NO: 891 - protein, 8 aa, Mus musculus
IDPTNDYS

SEQ ID NO: 892 - protein, 12 aa, Mus musculus
ARSRGKDWYFDV

SEQ ID NO: 893 - protein, 8 aa, Mus musculus
LQCATSWT

SEQ ID NO: 894 - protein, 8 aa, Mus musculus
GYTFTSFN

SEQ ID NO: 895 - protein, 8 aa, Mus musculus
FFPGNGAT

SEQ ID NO: 896 - protein, 10 aa, Mus musculus
AREGWLSLGY

SEQ ID NO: 897 - protein, 6 aa, Mus musculus
QNVYTN

SEQ ID NO: 898 - protein, 9 aa, Mus musculus
QQHNRYPYT

SEQ ID NO: 899 - protein, 8 aa, Mus musculus
GYTFSNYW

SEQ ID NO: 900 - protein, 8 aa, Mus musculus
IFPGGGSA

SEQ ID NO: 901 - protein, 13 aa, Mus musculus
ARQKYGNYYYFDY

SEQ ID NO: 902 - protein, 9 aa, Mus musculus
QQYSKLPYT

SEQ ID NO: 903 - protein, 8 aa, Mus musculus
FIPYNGGT

SEQ ID NO: 904 - protein, 12 aa, Mus musculus
ARGLRGFFSMDY

SEQ ID NO: 905 - protein, 11 aa, Mus musculus
QSLTNSYGNTY

SEQ ID NO: 906 - protein, 8 aa, Mus musculus
GFSLTSYG

SEQ ID NO: 907 - protein, 7 aa, Mus musculus
IWSDGST

SEQ ID NO: 908 - protein, 13 aa, Mus musculus
ARQIYYDYGWFAY

SEQ ID NO: 909 - protein, 11 aa, Mus musculus
QNLTNSYGNTY

SEQ ID NO: 910 - protein, 8 aa, Mus musculus
GYSFTDYI

SEQ ID NO: 911 - protein, 12 aa, Mus musculus
ARGLRGYYAMDY

SEQ ID NO: 912 - protein, 11 aa, Mus musculus
QSLANSYGSTF

SEQ ID NO: 913 - protein, 8 aa, Mus musculus
ILPGSGSA

SEQ ID NO: 914 - protein, 6 aa, Mus musculus
QGISNY

SEQ ID NO: 915 - protein, 9 aa, Mus musculus
QHYSKLPYT

SEQ ID NO: 916 - protein, 8 aa, Mus musculus
INTETGEP

SEQ ID NO: 917 - protein, 14 aa, Mus musculus
TRTDYGNPYWYFDV

SEQ ID NO: 918 - protein, 5 aa, Mus musculus
SSVNY

SEQ ID NO: 919 - protein, 8 aa, Mus musculus
ISPYNGGT

SEQ ID NO: 920 - protein, 11 aa, Mus musculus
ARRNYGYYFDY

SEQ ID NO: 921 - protein, 9 aa, Mus musculus
LQGTHQPLT

SEQ ID NO: 922 - protein, 8 aa, Mus musculus
GFDFSRYD

SEQ ID NO: 923 - protein, 13 aa, Mus musculus
ARQDYRYPYIMDY

SEQ ID NO: 924 - protein, 9 aa, Mus musculus
QQGQSYPWT

SEQ ID NO: 925 - protein, 10 aa, Mus musculus
GFSLSTYGIG

SEQ ID NO: 926 - protein, 7 aa, Mus musculus
IWWNDNK

SEQ ID NO: 927 - protein, 12 aa, Mus musculus
ARIGSGKFYFDY

SEQ ID NO: 928 - protein, 5 aa, Mus musculus
SSVSY

SEQ ID NO: 929 - protein, 3 aa, Mus musculus
LTS

SEQ ID NO: 930 - protein, 9 aa, Mus musculus
QQWSSNPPT

SEQ ID NO: 931 - protein, 12 aa, Mus musculus
QSVLYSSNQKNF

SEQ ID NO: 932 - protein, 8 aa, Mus musculus
GYTFTNYW

SEQ ID NO: 933 - protein, 8 aa, Mus musculus
IDPSDSFP

SEQ ID NO: 934 - protein, 10 aa, Mus musculus
TRGPRGYGDY

SEQ ID NO: 935 - protein, 6 aa, Mus musculus
QDIKNY

SEQ ID NO: 936 - protein, 3 aa, Mus musculus
YAT

SEQ ID NO: 937 - protein, 9 aa, Mus musculus
LHHGESPPT

SEQ ID NO: 938 - protein, 8 aa, Mus musculus
IFPGSGTS

SEQ ID NO: 939 - protein, 10 aa, Mus musculus
AREGLYAFDY

SEQ ID NO: 940 - protein, 6 aa, Mus musculus
QNIRNS

SEQ ID NO: 941 - protein, 3 aa, Mus musculus
YAS

SEQ ID NO: 942 - protein, 9 aa, Mus musculus
LQSNSWPYT

SEQ ID NO: 943 - protein, 8 aa, Mus musculus
GYTFTSYN

SEQ ID NO: 944 - protein, 8 aa, Mus musculus
IFPGNGFT

SEQ ID NO: 945 - protein, 10 aa, Mus musculus
TREGWLSLGY

SEQ ID NO: 946 - protein, 7 aa, Mus musculus
SSVNSTY

SEQ ID NO: 947 - protein, 3 aa, Mus musculus
RSS

SEQ ID NO: 948 - protein, 9 aa, Mus musculus
HQWSGYPFT

SEQ ID NO: 949 - protein, 8 aa, Mus musculus
GYAFTGYY

SEQ ID NO: 950 - protein, 8 aa, Mus musculus
ITCYNGAT

SEQ ID NO: 951 - protein, 12 aa, Mus musculus
ARSNYRPWYFDV

SEQ ID NO: 952 - protein, 6 aa, Mus musculus
QDVSTD

SEQ ID NO: 953 - protein, 8 aa, Mus musculus
GYTFTSFW

SEQ ID NO: 954 - protein, 8 aa, Mus musculus
IFPGGGDP

SEQ ID NO: 955 - protein, 6 aa, Mus musculus
QSVRNN

SEQ ID NO: 956 - protein, 9 aa, Mus musculus
QQSNSWPYT

SEQ ID NO: 957 - protein, 8 aa, Mus musculus
IFPGSDSS

SEQ ID NO: 958 - protein, 13 aa, Mus musculus
ARQKYGNFYYFDY

SEQ ID NO: 959 - protein, 7 aa, Mus musculus
IWPGGST

SEQ ID NO: 960 - protein, 6 aa, Mus musculus
QNVGTN

SEQ ID NO: 961 - protein, 9 aa, Mus musculus
QQHNSYPYT

SEQ ID NO: 962 - protein, 8 aa, Mus musculus
IFPGSGTT

SEQ ID NO: 963 - protein, 12 aa, Mus musculus
QSLLNSRTRKNS

SEQ ID NO: 964 - protein, 8 aa, Mus musculus
KQSFNLYT

SEQ ID NO: 965 - protein, 8 aa, Mus musculus
IFPGSGTN

SEQ ID NO: 966 - protein, 6 aa, Mus musculus
QSIRNS

SEQ ID NO: 967 - protein, 9 aa, Mus musculus
QQSYSWPYT

SEQ ID NO: 968 - protein, 8 aa, Mus musculus
IFPYNSAT

SEQ ID NO: 969 - protein, 12 aa, Mus musculus
ARGLRGFFALDY

SEQ ID NO: 970 - protein, 16 aa, Mus musculus
ASSGGYGNFAPYYFDQ

SEQ ID NO: 971 - protein, 8 aa, Mus musculus
GFAFSTYD

SEQ ID NO: 972 - protein, 6 aa, Mus musculus
QSISDY

SEQ ID NO: 973 - protein, 9 aa, Mus musculus
QDGNTFPPT

SEQ ID NO: 974 - protein, 11 aa, Mus musculus
ARSSLRWYFDL

SEQ ID NO: 975 - protein, 8 aa, Mus musculus
ILPVSGSA

SEQ ID NO: 976 - protein, 8 aa, Mus musculus
GYTFSSHN

SEQ ID NO: 977 - protein, 6 aa, Mus musculus
QNVVTN

SEQ ID NO: 978 - protein, 8 aa, Mus musculus
GYSFTDYT

SEQ ID NO: 979 - protein, 8 aa, Mus musculus
IFPYNGAT

SEQ ID NO: 980 - protein, 8 aa, Mus musculus
IVPNNGGT

SEQ ID NO: 981 - protein, 9 aa, Mus musculus
LQNTHQPPT

SEQ ID NO: 982 - protein, 7 aa, Mus musculus
IWWDDDT

SEQ ID NO: 983 - protein, 11 aa, Mus musculus
QSIVYSNGNTY

SEQ ID NO: 984 - protein, 9 aa, Mus musculus
FQGSHVPFT

SEQ ID NO: 985 - protein, 8 aa, Mus musculus
IVPYNGGT

SEQ ID NO: 986 - protein, 8 aa, Mus musculus
GFTFTDYY

SEQ ID NO: 987 - protein, 10 aa, Mus musculus
IRNKAKGYTT

SEQ ID NO: 988 - protein, 6 aa, Mus musculus
ARDGGY

SEQ ID NO: 989 - protein, 6 aa, Mus musculus
DHINNW

SEQ ID NO: 990 - protein, 9 aa, Mus musculus
QQYWSTPFT

SEQ ID NO: 991 - protein, 10 aa, Mus musculus
GFSLSTSGMG

SEQ ID NO: 992 - protein, 7 aa, Mus musculus
IWWDDVK

SEQ ID NO: 993 - protein, 12 aa, Mus musculus
ARIAVGQAWFAY

SEQ ID NO: 994 - protein, 8 aa, Mus musculus
IFPYNGGT

SEQ ID NO: 995 - protein, 8 aa, Mus musculus
GYIFTNYW

SEQ ID NO: 996 - protein, 8 aa, Mus musculus
IYPGGGYT

SEQ ID NO: 997 - protein, 13 aa, Mus musculus
ARSRQLASYAMDY

SEQ ID NO: 998 - protein, 6 aa, Mus musculus
ENIYSY

SEQ ID NO: 999 - protein, 9 aa, Mus musculus
QHHYGTPPT

SEQ ID NO: 1000 - protein, 8 aa, Mus musculus
GFPFNDYY

SEQ ID NO: 1001 - protein, 10 aa, Mus musculus
IRNKANGYTT

SEQ ID NO: 1002 - protein, 9 aa, Mus musculus
QQYWSIPFT

SEQ ID NO: 1003 - protein, 8 aa, Mus musculus
IYPGNGYT

SEQ ID NO: 1004 - protein, 10 aa, Mus musculus
AREGGWAMDY

SEQ ID NO: 1005 - protein, 9 aa, Mus musculus
QQWNSNPPT

SEQ ID NO: 1006 - protein, 11 aa, Mus musculus
QSLANSYGDTF

SEQ ID NO: 1007 - protein, 10 aa, Mus musculus
IRNKAHGYTT

SEQ ID NO: 1008 - protein, 8 aa, Mus musculus
DYSFTSYW

SEQ ID NO: 1009 - protein, 8 aa, Mus musculus
IYPGNSAA

SEQ ID NO: 1010 - protein, 10 aa, Mus musculus
SREGGYGLDY

SEQ ID NO: 1011 - protein, 6 aa, Mus musculus
QSIYNN

SEQ ID NO: 1012 - protein, 7 aa, Mus musculus
SSVSSSN

SEQ ID NO: 1013 - protein, 12 aa, Mus musculus
QNILYSSNQKNY

SEQ ID NO: 1014 - protein, 8 aa, Mus musculus
ILPVSGSS

SEQ ID NO: 1015 - protein, 8 aa, Mus musculus
ILPGSGSS

SEQ ID NO: 1016 - protein, 13 aa, Mus musculus
ARQKYGNYYYFDF

SEQ ID NO: 1017 - protein, 6 aa, Mus musculus
QGLSNY

SEQ ID NO: 1018 - protein, 8 aa, Mus musculus
GFTFSTYA

SEQ ID NO: 1019 - protein, 8 aa, Mus musculus
ISSGGTYT

SEQ ID NO: 1020 - protein, 14 aa, Mus musculus
ARHFISTIITHFDY

SEQ ID NO: 1021 - protein, 12 aa, Mus musculus
QSVLYSSNQMNY

SEQ ID NO: 1022 - protein, 8 aa, Mus musculus
GYSITSYW

SEQ ID NO: 1023 - protein, 8 aa, Mus musculus
VYPGNSNT

SEQ ID NO: 1024 - protein, 10 aa, Mus musculus
TREGGYGMDY

SEQ ID NO: 1025 - protein, 6 aa, Mus musculus
QTISNN

SEQ ID NO: 1026 - protein, 3 aa, Mus musculus
YSS

SEQ ID NO: 1027 - protein, 14 aa, Mus musculus
TRTNYGNPYWYFDV

SEQ ID NO: 1028 - protein, 9 aa, Mus musculus
QQWNFNPQT

SEQ ID NO: 1029 - protein, 8 aa, Mus musculus
GFTFNDYY

SEQ ID NO: 1030 - protein, 8 aa, Mus musculus
GYSFIDYI

SEQ ID NO: 1031 - protein, 11 aa, Mus musculus
QSLTNSYGSTF

SEQ ID NO: 1032 - protein, 8 aa, Mus musculus
IFPGTGSA

SEQ ID NO: 1033 - protein, 10 aa, Mus musculus
TREGLYPFDY

SEQ ID NO: 1034 - protein, 6 aa, Mus musculus
QNIRNN

SEQ ID NO: 1035 - protein, 7 aa, Mus musculus
IWSGGST

SEQ ID NO: 1036 - protein, 10 aa, Mus musculus
AREVRRYFDV

SEQ ID NO: 1037 - protein, 7 aa, Mus musculus
SSVISSY

SEQ ID NO: 1038 - protein, 3 aa, Mus musculus
STS

SEQ ID NO: 1039 - protein, 9 aa, Mus musculus
HQYHRSPLT

SEQ ID NO: 1040 - protein, 9 aa, Mus musculus
FQGSHVPGT

SEQ ID NO: 1041 - protein, 8 aa, Mus musculus
IIPYNGGS

SEQ ID NO: 1042 - protein, 12 aa, Mus musculus
ARGLRGYFAMDY

SEQ ID NO: 1043 - protein, 13 aa, Mus musculus
ARQKYGNFYYFDF

SEQ ID NO: 1044 - protein, 6 aa, Mus musculus
QGIGNY

SEQ ID NO: 1045 - protein, 9 aa, Mus musculus
HQYSKLPYT

SEQ ID NO: 1046 - protein, 8 aa, Mus musculus
ISTYIGEP

SEQ ID NO: 1047 - protein, 7 aa, Mus musculus
ARDSFAH

SEQ ID NO: 1048 - protein, 3 aa, Mus musculus
RVS

SEQ ID NO: 1049 - protein, 5 aa, Mus musculus
SSVSS

SEQ ID NO: 1050 - protein, 9 aa, Mus musculus
QQWSSNPST

SEQ ID NO: 1051 - protein, 8 aa, Mus musculus
IYPGSGTT

SEQ ID NO: 1052 - protein, 10 aa, Mus musculus
TREGLYAFDQ

SEQ ID NO: 1053 - protein, 6 aa, Mus musculus
QSIRSS

SEQ ID NO: 1054 - protein, 9 aa, Mus musculus
QQSNTWPYT

SEQ ID NO: 1055 - protein, 8 aa, Mus musculus
GYTFTIHW

SEQ ID NO: 1056 - protein, 13 aa, Mus musculus
ARDYGYDVYAMDY

SEQ ID NO: 1057 - protein, 9 aa, Mus musculus
WQGTHFPRT

SEQ ID NO: 1058 - protein, 8 aa, Mus musculus
GFAFSSFD

SEQ ID NO: 1059 - protein, 13 aa, Mus musculus
TRQDYRYPYIMDY

SEQ ID NO: 1060 - protein, 8 aa, Mus musculus
GYIFTNFW

SEQ ID NO: 1061 - protein, 11 aa, Mus musculus
QNIVHSNGNTY

SEQ ID NO: 1062 - protein, 9 aa, Mus musculus
FQTSHVPGT

SEQ ID NO: 1063 - protein, 10 aa, Mus musculus
IRDKANGYTT

SEQ ID NO: 1064 - protein, 8 aa, Mus musculus
GYSFSDYN

SEQ ID NO: 1065 - protein, 8 aa, Mus musculus
IDVYYLST

SEQ ID NO: 1066 - protein, 5 aa, Mus musculus
SSVTY

SEQ ID NO: 1067 - protein, 9 aa, Mus musculus
QHWSSYPLT

SEQ ID NO: 1068 - protein, 10 aa, Mus musculus
TREGLYSFDY

SEQ ID NO: 1069 - protein, 6 aa, Mus musculus
QSIRNN

SEQ ID NO: 1070 - protein, 3 aa, Mus musculus
YVS

SEQ ID NO: 1071 - protein, 9 aa, Mus musculus
QQSISWPYT

SEQ ID NO: 1072 - protein, 8 aa, Mus musculus
IFPGSGIT

SEQ ID NO: 1073 - protein, 9 aa, Mus musculus
QQTNSWPYT

SEQ ID NO: 1074 - protein, 8 aa, Mus musculus
GYIFTNYG

SEQ ID NO: 1075 - protein, 8 aa, Mus musculus
INSYTGES

SEQ ID NO: 1076 - protein, 8 aa, Mus musculus
GYTFTTFW

SEQ ID NO: 1077 - protein, 8 aa, Mus musculus
IFPGRGIT

SEQ ID NO: 1078 - protein, 9 aa, Mus musculus
SRGLGYFDV

SEQ ID NO: 1079 - protein, 6 aa, Mus musculus
QSIGTS

SEQ ID NO: 1080 - protein, 3 aa, Mus musculus
YGS

SEQ ID NO: 1081 - protein, 9 aa, Mus musculus
QQSYRWPYT

SEQ ID NO: 1082 - protein, 8 aa, Mus musculus
IFPGTGST

SEQ ID NO: 1083 - protein, 11 aa, Mus musculus
QSLTNSYGNTF

SEQ ID NO: 1084 - protein, 8 aa, Mus musculus
GYTFTSYY

SEQ ID NO: 1085 - protein, 8 aa, Mus musculus
IYPGDGST

SEQ ID NO: 1086 - protein, 12 aa, Mus musculus
TRDGNYGDWFPY

SEQ ID NO: 1087 - protein, 9 aa, Mus musculus
FQGSHVPYT

SEQ ID NO: 1088 - protein, 8 aa, Mus musculus
ILPVSDSA

SEQ ID NO: 1089 - protein, 6 aa, Mus musculus
QGISSY

SEQ ID NO: 1090 - protein, 10 aa, Mus musculus
ESVDKYGISF

SEQ ID NO: 1091 - protein, 9 aa, Mus musculus
QQSKEVPWT

SEQ ID NO: 1092 - protein, 10 aa, Mus musculus
ARSVRFSFDY

SEQ ID NO: 1093 - protein, 3 aa, Mus musculus
EIS

SEQ ID NO: 1094 - protein, 8 aa, Mus musculus
GYSFTGYY

SEQ ID NO: 1095 - protein, 8 aa, Mus musculus
VNPNNGGT

SEQ ID NO: 1096 - protein, 15 aa, Mus musculus
ASSPLLRLRGYAMDD

SEQ ID NO: 1097 - protein, 10 aa, Mus musculus
ESVDSYGKSF

SEQ ID NO: 1098 - protein, 3 aa, Mus musculus
VAS

SEQ ID NO: 1099 - protein, 9 aa, Mus musculus
QQNNEDPWT

SEQ ID NO: 1100 - protein, 8 aa, Mus musculus
IYPGRGIT

SEQ ID NO: 1101 - protein, 10 aa, Mus musculus
SREGLYPFDY

SEQ ID NO: 1102 - protein, 6 aa, Mus musculus
QHVVTN

SEQ ID NO: 1103 - protein, 8 aa, Mus musculus
GFSLTSYD

SEQ ID NO: 1104 - protein, 13 aa, Mus musculus
VRSTMITHYAMDY

SEQ ID NO: 1105 - protein, 6 aa, Mus musculus
QNIGTS

SEQ ID NO: 1106 - protein, 3 aa, Mus musculus
YAF

SEQ ID NO: 1107 - protein, 9 aa, Mus musculus
QQSNSWPLT

SEQ ID NO: 1108 - protein, 3 aa, Mus musculus
YVF

SEQ ID NO: 1109 - protein, 8 aa, Mus musculus
GFSFTDYN

SEQ ID NO: 1110 - protein, 8 aa, Mus musculus
VDIYYSGT

SEQ ID NO: 1111 - protein, 8 aa, Mus musculus
IDPSDSYT

SEQ ID NO: 1112 - protein, 10 aa, Mus musculus
TRPSSYFFDY

SEQ ID NO: 1113 - protein, 8 aa, Mus musculus
IYPGNDGT

SEQ ID NO: 1114 - protein, 10 aa, Mus musculus
AREGWLSLDY

SEQ ID NO: 1115 - protein, 9 aa, Mus musculus
QQYKSYPYT

SEQ ID NO: 1116 - protein, 8 aa, Mus musculus
GYSFTGNI

SEQ ID NO: 1117 - protein, 12 aa, Mus musculus
ARGFRGYFAMDY

SEQ ID NO: 1118 - protein, 8 aa, Mus musculus
GYTFTDYN

SEQ ID NO: 1119 - protein, 8 aa, Mus musculus
IYPYNVGT

SEQ ID NO: 1120 - protein, 8 aa, Mus musculus
ARKNPLDY

SEQ ID NO: 1121 - protein, 9 aa, Mus musculus
AQLLELPYT

SEQ ID NO: 1122 - protein, 8 aa, Mus musculus
GYTFSNCW

SEQ ID NO: 1123 - protein, 8 aa, Mus musculus
GYSFTSYW

SEQ ID NO: 1124 - protein, 8 aa, Mus musculus
FYPGNSAT

SEQ ID NO: 1125 - protein, 10 aa, Mus musculus
SREGGYGMDH

SEQ ID NO: 1126 - protein, 10 aa, Mus musculus
QSVSTSRYSY

SEQ ID NO: 1127 - protein, 9 aa, Mus musculus
QHSWEIPLT

SEQ ID NO: 1128 - protein, 8 aa, Mus musculus
GYTFSNYN

SEQ ID NO: 1129 - protein, 8 aa, Mus musculus
IFPGNGVT

SEQ ID NO: 1130 - protein, 11 aa, Mus musculus
ARGGFGGALDY

SEQ ID NO: 1131 - protein, 5 aa, Mus musculus
SSVSH

SEQ ID NO: 1132 - protein, 9 aa, Mus musculus
QQWNNNPLT

SEQ ID NO: 1133 - protein, 11 aa, Mus musculus
ARGGFGGAMDY

SEQ ID NO: 1134 - protein, 8 aa, Mus musculus
GYTFTNFG

SEQ ID NO: 1135 - protein, 8 aa, Mus musculus
INTYTGEP

SEQ ID NO: 1136 - protein, 11 aa, Mus musculus
KNLQHNNGITY

SEQ ID NO: 1137 - protein, 8 aa, Mus musculus
IYPGNGFT

SEQ ID NO: 1138 - protein, 9 aa, Mus musculus
QQWNSNPST

SEQ ID NO: 1139 - protein, 6 aa, Mus musculus
DHIHNW

SEQ ID NO: 1140 - protein, 10 aa, Mus musculus
TREGLYAFDY

SEQ ID NO: 1141 - protein, 8 aa, Mus musculus
IYPGGGTT

SEQ ID NO: 1142 - protein, 8 aa, Mus musculus
IYPGNSDT

SEQ ID NO: 1143 - protein, 3 aa, Mus musculus
FSS

SEQ ID NO: 1144 - protein, 11 aa, Mus musculus
TRRNYGYYFDY

SEQ ID NO: 1145 - protein, 8 aa, Mus musculus
IYPGRGIA

SEQ ID NO: 1146 - protein, 9 aa, Mus musculus
QQSNRWPYT

SEQ ID NO: 1147 - protein, 5 aa, Mus musculus
SSVSQ

SEQ ID NO: 1148 - protein, 9 aa, Mus musculus
FQASHVPGT

SEQ ID NO: 1149 - protein, 8 aa, Mus musculus
GYTFTNFW

SEQ ID NO: 1150 - protein, 8 aa, Mus musculus
IFPGGGYT

SEQ ID NO: 1151 - protein, 10 aa, Mus musculus
SRSTMLTGTY

SEQ ID NO: 1152 - protein, 6 aa, Mus musculus
RDIKSY

SEQ ID NO: 1153 - protein, 9 aa, Mus musculus
LHHGESPYT

SEQ ID NO: 1154 - protein, 8 aa, Mus musculus
IFPGGGHT

SEQ ID NO: 1155 - protein, 10 aa, Mus musculus
SRSTILTGAY

SEQ ID NO: 1156 - protein, 6 aa, Mus musculus
QDIKSY

SEQ ID NO: 1157 - protein, 8 aa, Mus musculus
INPGSGGN

SEQ ID NO: 1158 - protein, 14 aa, Mus musculus
ARRGDKYGSAWFAY

SEQ ID NO: 1159 - protein, 8 aa, Mus musculus
IDVYYSST

SEQ ID NO: 1160 - protein, 8 aa, Mus musculus
INSNNGGA

SEQ ID NO: 1161 - protein, 12 aa, Mus musculus
ARGDYYGTTYDY

SEQ ID NO: 1162 - protein, 8 aa, Mus musculus
IHPYNGGT

SEQ ID NO: 1163 - protein, 10 aa, Mus musculus
ARLLRYAMDY

SEQ ID NO: 1164 - protein, 3 aa, Mus musculus
RTS

SEQ ID NO: 1165 - protein, 9 aa, Mus musculus
QQYHGYPPT

SEQ ID NO: 1166 - protein, 8 aa, Mus musculus
GYTFISYW

SEQ ID NO: 1167 - protein, 8 aa, Mus musculus
IYPGDGDT

SEQ ID NO: 1168 - protein, 8 aa, Mus musculus
ARGTVGDY

SEQ ID NO: 1169 - protein, 11 aa, Mus musculus
QSLANSYGVTY

SEQ ID NO: 1170 - protein, 8 aa, Mus musculus
GFAFSRYD

SEQ ID NO: 1171 - protein, 8 aa, Mus musculus
ISSGGSYS

SEQ ID NO: 1172 - protein, 3 aa, Mus musculus
KTS

SEQ ID NO: 1173 - protein, 11 aa, Mus musculus
ARFRLWQGMDY

SEQ ID NO: 1174 - protein, 8 aa, Mus musculus
IFPGSDTT

SEQ ID NO: 1175 - protein, 6 aa, Mus musculus
PNIRNS

SEQ ID NO: 1176 - protein, 3 aa, Mus musculus
FAS

SEQ ID NO: 1177 - protein, 8 aa, Mus musculus
IFPHSGIT

SEQ ID NO: 1178 - protein, 8 aa, Mus musculus
IYPGNNAT

SEQ ID NO: 1179 - protein, 10 aa, Mus musculus
SREGGFGMDY

SEQ ID NO: 1180 - protein, 6 aa, Mus musculus
QSITNN

SEQ ID NO: 1181 - protein, 12 aa, Mus musculus
ARGLRGYYTMDY

SEQ ID NO: 1182 - protein, 11 aa, Mus musculus
QSLANIYGNTY

SEQ ID NO: 1183 - protein, 6 aa, Mus musculus
QSVGTS

SEQ ID NO: 1184 - protein, 3 aa, Mus musculus
YGF

SEQ ID NO: 1185 - protein, 7 aa, Mus musculus
SSVSSSD

SEQ ID NO: 1186 - protein, 7 aa, Mus musculus
IWWDDDS

SEQ ID NO: 1187 - protein, 11 aa, Mus musculus
QSIVHSNGNTY

SEQ ID NO: 1188 - protein, 10 aa, Mus musculus
TREGLSPFDY

SEQ ID NO: 1189 - protein, 7 aa, Mus musculus
SSVSSRY

SEQ ID NO: 1190 - protein, 8 aa, Mus musculus
GYTFTSYS

SEQ ID NO: 1191 - protein, 8 aa, Mus musculus
IYPGNVIT

SEQ ID NO: 1192 - protein, 9 aa, Mus musculus
ARDGGFGTY

SEQ ID NO: 1193 - protein, 6 aa, Mus musculus
QNVHTN

SEQ ID NO: 1194 - protein, 9 aa, Mus musculus
QQYNSYPYT

SEQ ID NO: 1195 - protein, 12 aa, Mus musculus
TRGLRGYFALDY

SEQ ID NO: 1196 - protein, 9 aa, Mus musculus
LQGTHLPWT

SEQ ID NO: 1197 - protein, 8 aa, Mus musculus
IYPGNGGT

SEQ ID NO: 1198 - protein, 10 aa, Mus musculus
ARDGFYPFDY

SEQ ID NO: 1199 - protein, 9 aa, Mus musculus
QQYNSYPLT

SEQ ID NO: 1200 - protein, 9 aa, Mus musculus
LQGIHQPWT

SEQ ID NO: 1201 - protein, 8 aa, Mus musculus
IYPGNSNT

SEQ ID NO: 1202 - protein, 13 aa, Mus musculus
ARQKYGTYYYFDY

SEQ ID NO: 1203 - protein, 8 aa, Mus musculus
IFPGGDYT

SEQ ID NO: 1204 - protein, 10 aa, Mus musculus
SRSTIISGAY

SEQ ID NO: 1205 - protein, 9 aa, Mus musculus
LHHGERPYT

SEQ ID NO: 1206 - protein, 10 aa, Mus musculus
TRLLRFAMDY

SEQ ID NO: 1207 - protein, 11 aa, Mus musculus
QSLANSYGSTY

SEQ ID NO: 1208 - protein, 8 aa, Mus musculus
GFVFSSYD

SEQ ID NO: 1209 - protein, 13 aa, Mus musculus
ARQDYRYPYTMDY

SEQ ID NO: 1210 - protein, 8 aa, Mus musculus
GYSFTRYW

SEQ ID NO: 1211 - protein, 8 aa, Mus musculus
GYTFTDYA

SEQ ID NO: 1212 - protein, 8 aa, Mus musculus
IGTSNGNT

SEQ ID NO: 1213 - protein, 14 aa, Mus musculus
TRDYYGRSYLYFDY

SEQ ID NO: 1214 - protein, 9 aa, Mus musculus
QQYSGYPLT

SEQ ID NO: 1215 - protein, 10 aa, Mus musculus
ARSRSFAMDY

SEQ ID NO: 1216 - protein, 8 aa, Mus musculus
GFTFSDYY

SEQ ID NO: 1217 - protein, 8 aa, Mus musculus
GYTFTDHS

SEQ ID NO: 1218 - protein, 12 aa, Mus musculus
ASPRNYDGAMDY

SEQ ID NO: 1219 - protein, 9 aa, Mus musculus
QQYWSTPLT

SEQ ID NO: 1220 - protein, 8 aa, Mus musculus
GFTFTSYY

SEQ ID NO: 1221 - protein, 6 aa, Mus musculus
EHIYGA

SEQ ID NO: 1222 - protein, 9 aa, Mus musculus
QNVLSTPLT

SEQ ID NO: 1223 - protein, 8 aa, Mus musculus
GYAFSSSW

SEQ ID NO: 1224 - protein, 9 aa, Mus musculus
ASNYYYFDY

SEQ ID NO: 1225 - protein, 10 aa, Mus musculus
KSVSTSGYSY

SEQ ID NO: 1226 - protein, 3 aa, Mus musculus
LAS

SEQ ID NO: 1227 - protein, 9 aa, Mus musculus
QHSRELPWT

SEQ ID NO: 1228 - protein, 8 aa, Mus musculus
TNPSTGSS

SEQ ID NO: 1229 - protein, 11 aa, Mus musculus
AAYYRYGDGAY

SEQ ID NO: 1230 - protein, 8 aa, Mus musculus
GFTFSTYV

SEQ ID NO: 1231 - protein, 8 aa, Mus musculus
ISSGGSYI

SEQ ID NO: 1232 - protein, 12 aa, Mus musculus
ARWLLGLYAMDY

SEQ ID NO: 1233 - protein, 9 aa, Mus musculus
QQGQSYPRT

SEQ ID NO: 1234 - protein, 8 aa, Mus musculus
GYAFSSYW

SEQ ID NO: 1235 - protein, 8 aa, Mus musculus
IYPGDGDS

SEQ ID NO: 1236 - protein, 10 aa, Mus musculus
ARRKDYGYDY

SEQ ID NO: 1237 - protein, 8 aa, Mus musculus
GFTFSEFY

SEQ ID NO: 1238 - protein, 10 aa, Mus musculus
SRNKANDYST

SEQ ID NO: 1239 - protein, 12 aa, Mus musculus
ARDAYGYPWFVY

SEQ ID NO: 1240 - protein, 12 aa, Mus musculus
QSLLYSGNQKNY

SEQ ID NO: 1241 - protein, 9 aa, Mus musculus
QQYYSYPWT

SEQ ID NO: 1242 - protein, 8 aa, Mus musculus
GFTFSNFG

SEQ ID NO: 1243 - protein, 8 aa, Mus musculus
ISSGSSTI

SEQ ID NO: 1244 - protein, 13 aa, Mus musculus
ARGRYDYLYAMDY

SEQ ID NO: 1245 - protein, 10 aa, Mus musculus
ITNKANGYTT

SEQ ID NO: 1246 - protein, 8 aa, Mus musculus
GFTFSNFW

SEQ ID NO: 1247 - protein, 10 aa, Mus musculus
IRLNSDNYAT

SEQ ID NO: 1248 - protein, 9 aa, Mus musculus
HGNFYDLDY

SEQ ID NO: 1249 - protein, 6 aa, Mus musculus
QEISGF

SEQ ID NO: 1250 - protein, 9 aa, Mus musculus
LQYASYPPT

SEQ ID NO: 1251 - protein, 8 aa, Mus musculus
GFSFTAYT

SEQ ID NO: 1252 - protein, 12 aa, Mus musculus
ARGLQRFFAMDF

SEQ ID NO: 1253 - protein, 9 aa, Mus musculus
LQYTHQPPT

SEQ ID NO: 1254 - protein, 8 aa, Mus musculus
GYSFTTYT

SEQ ID NO: 1255 - protein, 11 aa, Mus musculus
QSLANSYGDTY

SEQ ID NO: 1256 - protein, 8 aa, Mus musculus
IYPYNGGT

SEQ ID NO: 1257 - protein, 9 aa, Mus musculus
ARYYGYFDY

SEQ ID NO: 1258 - protein, 12 aa, Mus musculus
ARGLQRFYAMDY

SEQ ID NO: 1259 - protein, 9 aa, Mus musculus
HGNFYTLDY

SEQ ID NO: 1260 - protein, 6 aa, Mus musculus
QEITGF

SEQ ID NO: 1261 - protein, 8 aa, Mus musculus
TNPSTGYS

SEQ ID NO: 1262 - protein, 8 aa, Mus musculus
GFTFSSFG

SEQ ID NO: 1263 - protein, 13 aa, Mus musculus
ARGRFDYLYAMDY

SEQ ID NO: 1264 - protein, 10 aa, Mus musculus
ARGLRFSLEY

SEQ ID NO: 1265 - protein, 10 aa, Mus musculus
ARGLSYRYDY

SEQ ID NO: 1266 - protein, 10 aa, Mus musculus
ARLISYAMDY

SEQ ID NO: 1267 - protein, 11 aa, Mus musculus
QSLANSYGKTY

SEQ ID NO: 1268 - protein, 6 aa, Mus musculus
DHINSW

SEQ ID NO: 1269 - protein, 3 aa, Mus musculus
GTT

SEQ ID NO: 1270 - protein, 8 aa, Mus musculus
GYAFTDYL

SEQ ID NO: 1271 - protein, 8 aa, Mus musculus
INPGSGGA

SEQ ID NO: 1272 - protein, 13 aa, Mus musculus
ARYHYYGSGLFPY

SEQ ID NO: 1273 - protein, 12 aa, Mus musculus
QSLLNSGNQKNY

SEQ ID NO: 1274 - protein, 9 aa, Mus musculus
QNYHSYPFT

SEQ ID NO: 1275 - protein, 8 aa, Mus musculus
GYTFTSYV

SEQ ID NO: 1276 - protein, 8 aa, Mus musculus
INPYNDGT

SEQ ID NO: 1277 - protein, 6 aa, Mus musculus
AREIDY

SEQ ID NO: 1278 - protein, 10 aa, Mus musculus
IRNKANCYTT

SEQ ID NO: 1279 - protein, 8 aa, Mus musculus
ARYEYFDY

SEQ ID NO: 1280 - protein, 6 aa, Mus musculus
TDIDDD

SEQ ID NO: 1281 - protein, 3 aa, Mus musculus
EGN

SEQ ID NO: 1282 - protein, 9 aa, Mus musculus
LQSDNMPYT

SEQ ID NO: 1283 - protein, 9 aa, Mus musculus
GYSITSDYA

SEQ ID NO: 1284 - protein, 7 aa, Mus musculus
ITYSGDT

SEQ ID NO: 1285 - protein, 11 aa, Mus musculus
ARRELGQGFTY

SEQ ID NO: 1286 - protein, 6 aa, Mus musculus
QDVSTT

SEQ ID NO: 1287 - protein, 9 aa, Mus musculus
QQHYSVPWT

SEQ ID NO: 1288 - protein, 8 aa, Mus musculus
GYTFTYYE

SEQ ID NO: 1289 - protein, 8 aa, Mus musculus
IDPETGGT

SEQ ID NO: 1290 - protein, 9 aa, Mus musculus
TRWGYKFAY

SEQ ID NO: 1291 - protein, 8 aa, Mus musculus
GYDFTDYL

SEQ ID NO: 1292 - protein, 8 aa, Mus musculus
INPGSGGT

SEQ ID NO: 1293 - protein, 13 aa, Mus musculus
ARYHYYGSNLFPY

SEQ ID NO: 1294 - protein, 10 aa, Mus musculus
ARSRTFAMDY

SEQ ID NO: 1295 - protein, 8 aa, Mus musculus
ISGGGSYT

SEQ ID NO: 1296 - protein, 12 aa, Mus musculus
TRWLQSLYAMDY

SEQ ID NO: 1297 - protein, 11 aa, Mus musculus
ASGGLRYGFAY

SEQ ID NO: 1298 - protein, 8 aa, Mus musculus
GFTFNTNA

SEQ ID NO: 1299 - protein, 10 aa, Mus musculus
IRSKSNNYAT

SEQ ID NO: 1300 - protein, 10 aa, Mus musculus
VGSTMTIFSY

SEQ ID NO: 1301 - protein, 7 aa, Mus musculus
IWADGST

SEQ ID NO: 1302 - protein, 14 aa, Mus musculus
ARDLGYLTTAWFAY

SEQ ID NO: 1303 - protein, 9 aa, Mus musculus
QQISSYPLT

SEQ ID NO: 1304 - protein, 8 aa, Mus musculus
GYSFTAYT

SEQ ID NO: 1305 - protein, 8 aa, Mus musculus
INPYNGGI

SEQ ID NO: 1306 - protein, 11 aa, Mus musculus
QSLENSYGNTY

SEQ ID NO: 1307 - protein, 8 aa, Mus musculus
GFSFPGYT

SEQ ID NO: 1308 - protein, 8 aa, Mus musculus
INPYNGAT

SEQ ID NO: 1309 - protein, 11 aa, Mus musculus
TRGTLITGFAY

SEQ ID NO: 1310 - protein, 9 aa, Mus musculus
LQGTHLPLT

SEQ ID NO: 1311 - protein, 8 aa, Mus musculus
GFSFTGYT

SEQ ID NO: 1312 - protein, 11 aa, Mus musculus
ARGTLITGFAY

SEQ ID NO: 1313 - protein, 11 aa, Mus musculus
QSLANSYGNTF

SEQ ID NO: 1314 - protein, 10 aa, Mus musculus
ARGLSFRYDY

SEQ ID NO: 1315 - protein, 12 aa, Mus musculus
ARGLPRFYAMDY

SEQ ID NO: 1316 - protein, 7 aa, Mus musculus
IWAGGTT

SEQ ID NO: 1317 - protein, 12 aa, Mus musculus
ARFPSYRESMDY

SEQ ID NO: 1318 - protein, 6 aa, Mus musculus
ENIYSN

SEQ ID NO: 1319 - protein, 3 aa, Mus musculus
AAT

SEQ ID NO: 1320 - protein, 9 aa, Mus musculus
QHFWGTPYT

SEQ ID NO: 1321 - protein, 12 aa, Mus musculus
TRWLLSLYAMDY

SEQ ID NO: 1322 - protein, 9 aa, Mus musculus
QQGQTYPFT

SEQ ID NO: 1323 - protein, 8 aa, Mus musculus
GFNIKDTY

SEQ ID NO: 1324 - protein, 8 aa, Mus musculus
IDPANGNI

SEQ ID NO: 1325 - protein, 8 aa, Mus musculus
ARSLPGAY

SEQ ID NO: 1326 - protein, 9 aa, Mus musculus
QQRSSFPPT

SEQ ID NO: 1327 - protein, 8 aa, Mus musculus
GFTFTNYY

SEQ ID NO: 1328 - protein, 10 aa, Mus musculus
IRNRPYGYTT

SEQ ID NO: 1329 - protein, 6 aa, Mus musculus
AAGLDY

SEQ ID NO: 1330 - protein, 8 aa, Mus musculus
GYAFSDYL

SEQ ID NO: 1331 - protein, 13 aa, Mus musculus
ARFHYYGSSLFPY

SEQ ID NO: 1332 - protein, 12 aa, Mus musculus
QSLLNSGNQKKY

SEQ ID NO: 1333 - protein, 9 aa, Mus musculus
QNYHRFPFT

SEQ ID NO: 1334 - protein, 8 aa, Mus musculus
GYIFTSYW

SEQ ID NO: 1335 - protein, 8 aa, Mus musculus
IYPGIGST

SEQ ID NO: 1336 - protein, 9 aa, Mus musculus
EVPIGTVDY

SEQ ID NO: 1337 - protein, 6 aa, Mus musculus
QTIGTW

SEQ ID NO: 1338 - protein, 9 aa, Mus musculus
QQLYNTPLT

SEQ ID NO: 1339 - protein, 13 aa, Mus musculus
ARLGVYYRYDGDY

SEQ ID NO: 1340 - protein, 9 aa, Mus musculus
WQGTHFPQT

SEQ ID NO: 1341 - protein, 8 aa, Mus musculus
GFTFIDYY

SEQ ID NO: 1342 - protein, 8 aa, Mus musculus
GFLITAYG

SEQ ID NO: 1343 - protein, 7 aa, Mus musculus
IWGDGST

SEQ ID NO: 1344 - protein, 10 aa, Mus musculus
ARYDYYGMDY

SEQ ID NO: 1345 - protein, 10 aa, Mus musculus
IRNKPYGYTT

SEQ ID NO: 1346 - protein, 8 aa, Mus musculus
GFTFSNYA

SEQ ID NO: 1347 - protein, 8 aa, Mus musculus
ISSGGIYT

SEQ ID NO: 1348 - protein, 13 aa, Mus musculus
ARQRTTATDYFDY

SEQ ID NO: 1349 - protein, 8 aa, Mus musculus
IYPGTGGT

SEQ ID NO: 1350 - protein, 9 aa, Mus musculus
QQLYSTPLT

SEQ ID NO: 1351 - protein, 8 aa, Mus musculus
IYPGTGST

SEQ ID NO: 1352 - protein, 9 aa, Mus musculus
EVPVGTFDY

SEQ ID NO: 1353 - protein, 11 aa, Mus musculus
ARREVGQGFTY

SEQ ID NO: 1354 - protein, 8 aa, Mus musculus
GFSLTSFG

SEQ ID NO: 1355 - protein, 7 aa, Mus musculus
IWADGGT

SEQ ID NO: 1356 - protein, 5 aa, Mus musculus
SSVRY

SEQ ID NO: 1357 - protein, 9 aa, Mus musculus
QQTSSYPLT

SEQ ID NO: 1358 - protein, 12 aa, Mus musculus
TRGLQRFYAMDY

SEQ ID NO: 1359 - protein, 7 aa, Mus musculus
IVYSGST

SEQ ID NO: 1360 - protein, 11 aa, Mus musculus
ARRQVGLGFAY

SEQ ID NO: 1361 - protein, 9 aa, Mus musculus
QQHYSSPWT

SEQ ID NO: 1362 - protein, 8 aa, Mus musculus
IIPYTGGT

SEQ ID NO: 1363 - protein, 8 aa, Mus musculus
GFTFSQFW

SEQ ID NO: 1364 - protein, 10 aa, Mus musculus
IRLKSNSYKT

SEQ ID NO: 1365 - protein, 8 aa, Mus musculus
TRLPIFDY

SEQ ID NO: 1366 - protein, 122 aa, Artificial Sequence
  Heavy chain variable domain
QVQLKQSGPGLVQPSQSLSITCTVSGFSLTRHGVHWVRQSPGKGLEWLGVIWPGGNTDYNTPFTSRLSINKDNSKSQVFFKMNSLQSNDTAIYYCARSGGYGNFAPYYFDQWGQGTLVTVSA

SEQ ID NO: 1367 - protein, 112 aa, Artificial Sequence
  Light chain variable domain
DIQLTQSPSSLSASVGDRVTMSCKSSQSVLYSSNQKNFLAWYQQKPGKAPKLLIYWASTRESGVPSRFSGSGSGTDFTFTISSLQPEDIATYYCHQYLSSYTFGGGTKLEIK

SEQ ID NO: 1368 - protein, 112 aa, Artificial Sequence
  Light chain variable domain
DIVMTQSPDSLAVSLGERVTMNCKSSQSVLYSSNQKNFLAWYQQKPGQSPKLLIYWASTRESGVPDRFSGSGSGTDFTLTISSVQAEDVAVYYCHQYLSSYTFGGGTKLEIK

SEQ ID NO: 1369 - protein, 119 aa, Artificial Sequence
  Heavy chain variable domain
DVKLVESGGGLVKLGGSLKLSCAASGFTFSSYTMSWVRQTPEKRLELVAAISSGGSYTYYLDTVKGRFTISRDNAKNTLYLQMSSLKSEDTALFYCTRWLLSLYAMDYWGQGTSVTVSS

SEQ ID NO: 1370 - protein, 107 aa, Artificial Sequence
  Light chain variable domain
AIQMTQSPSSLSASVGDRVTITCQASQNINVWLSWYQQKPGKAPKLLIYKASTLASGVPSRFSGSGSGTDFTLTISSLQPDDFATYYCQQGQTYPFTFGGGTKVEIK

SEQ ID NO: 1371 - protein, 107 aa, Artificial Sequence
  Light chain variable domain
DIQMTQSPSSLSASVGDRVTITCKASQNINVWLNWYQQKPGKAPKLLIYKASNLQTGVPSRFSGSGSGTDFTFTISSLQPEDIATYYCQQGQTYPFTFGQGTKVEIK

SEQ ID NO: 1372 - protein, 119 aa, Artificial Sequence
  Heavy chain variable domain
EVQLVESGGGLVQPGGSLRLSCAASGFTFSSYTMSWVRQAPGKGLEWVATISSGGSYTYYPDSVKGRFTISRDNAKNTLYLQMNSLRAEDTAVYYCTRWLLSLYAMDYWGQGTLVTVSS

SEQ ID NO: 1373 - protein, 120 aa, Artificial Sequence
  Heavy chain variable domain
DVKLVESGGGLVKLGGSLKLSCAASGFAFSSFDMSWVRQTPEKRLELVAAISSGGSYTYYLDTVKGRFTISRDNAKNTLYLQMSSLKSEDTALFYCTRQDYRYPYIMDYWGQGTSVTVSS

SEQ ID NO: 1374 - protein, 107 aa, Artificial Sequence
  Light chain variable domain
AIQMTQSPSSLSASVGDRVTITCQASQNINVWLSWYQQKPGKAPKLLIYKASTLASGVPSRFSGSGSGTDFTLTISSLQPDDFATYYCQQGQSYPWTFGGGTKVEIK

SEQ ID NO: 1375 - protein, 107 aa, Artificial Sequence
  Light chain variable domain
DIQMTQSPSSLSASVGDRVTITCKASQNINVWLNWYQQKPGKAPKLLIYKASNLQTGVPSRFSGSGSGTDFTFTISSLQPEDIATYYCQQGQSYPWTFGQGTKVEIK

SEQ ID NO: 1376 - protein, 120 aa, Artificial Sequence
  Heavy chain variable domain
EVQLVESGGKLLKPGGSLKLSCAASGFAFSSFDMSWFRQSPEKRLEWVAEISSGGSYTYYPDTVTGRFTISRDNAKNTLYLEMSSLRSEDTAMYYCTRQDYRYPYIMDYWGQGTSVTVSS

SEQ ID NO: 1377 - protein, 120 aa, Artificial Sequence
  Heavy chain variable domain
QVQLQQPGAELVKPGASVKMSCKASGYAFTDYLMHWVKQTPGRGLEWIGAINPGSGGTSYNQKFKGKATLTADKSSSTAYMQLSSLTSEDSAVYYCARYHYYGSGLFPYWGAGTTVTVSA

SEQ ID NO: 1378 - protein, 113 aa, Artificial Sequence
  Light chain variable domain
DIVMTQSPDSLAVSLGERATINCKSSQSLLNSGNQKNYLAWYQQKPGQPPKLLIYGASTRESGVPDRFSGSGSGTDFTLTISSLQAEDVAVYYCQNYHSYPFTFGGGTKLEIK

SEQ ID NO: 1379 - protein, 113 aa, Artificial Sequence
  Light chain variable domain
DIVMTQSPDSLAVSLGERVTMNCKSSQSLLNSGNQKNYLAWYQQKPGQSPKLLIYGASTRESGVPDRFSGSGSGTDFTLTISSVQAEDVAVYYCQNYHSYPFTFGGGTKLEIK

SEQ ID NO: 1380 - protein, 120 aa, Artificial Sequence
  Heavy chain variable domain
QVQLVQSGAEVKKPGASVKVSCKASGYAFTDYLIEWVRQAPGQGLEWIGVINPGSGGTNYNEKFKGRATITADKSTSTAYMELSSLRSEDTAVYFCARYHYYGSGLFPYWGQGTTVTVSS

SEQ ID NO: 1381 - protein, 120 aa, Artificial Sequence
  Heavy chain variable domain
QVQLQQPGAELVKPGASVKMSCKASGYTFSNYWMHWVKQTPGRGLEWIGAILPGSGSTSYNQKFKGKATLTADKSSSTAYMQLSSLTSEDSAVYYCARQKYGNFYYFDFWGAGTTVTVSA

SEQ ID NO: 1382 - protein, 107 aa, Artificial Sequence
  Light chain variable domain
DIQMTQSPSSLSASVGDRVTITCRASQGIGNYLAWYQQKPGKAPKLLIYYTSKIHSGVPSRFSGSGSGTDYTFTISSLQPEDIATYYCHQYSKLPYTFGQGTKVEIK

SEQ ID NO: 1383 - protein, 107 aa, Artificial Sequence
  Light chain variable domain
DIQMTQSPSSLSASVGDRVTITCSASQGIGNYLNWYQQKPGKAPKVLIYYTSSLHSGVPSRFSGSGSGTDFTLTISSLQPEDFATYYCHQYSKLPYTFGQGTKVEIK

SEQ ID NO: 1384 - protein, 120 aa, Artificial Sequence
  Heavy chain variable domain
QVQLVQSGAEVKKPGASVKVSCKASGYTFSNYWIQWVRQAPGQGLEWMGEILPGSGSTEYTENFKDRVTMTRDTSTSTVYMELSSLRSEDTAVYYCARQKYGNFYYFDFWGQGTLVTVSS

SEQ ID NO: 1385 - protein, 121 aa, Artificial Sequence
  Heavy chain variable domain
QVQLQQPGAELVKPGASVKMSCKASGYAFTNYLMHWVKQTPGRGLEWIGAINPGSGGTSYNQKFKGKATLTADKSSSTAYMQLSSLTSEDSAVYYCARTGVYGNFLIFDYWGAGTTVTVSA

SEQ ID NO: 1386 - protein, 113 aa, Artificial Sequence
  Light chain variable domain
DIVMTQSPDSLAVSLGERATINCKSSQSLLNSGIQKNYLAWYQQKPGQPPKLLIYGASTRESGVPDRFSGSGSGTDFTLTISSLQAEDVAVYYCQNDHRYPFTFGGGTKLEIK

SEQ ID NO: 1387 - protein, 113 aa, Artificial Sequence
  Light chain variable domain
DIVMTQSPDSLAVSLGERVTMNCKSSQSLLNSGIQKNYLAWYQQKPGQSPKLLIYGASTRESGVPDRFSGSGSGTDFTLTISSVQAEDVAVYYCQNDHRYPFTFGGGTKLEIK

SEQ ID NO: 1388 - protein, 121 aa, Artificial Sequence
  Heavy chain variable domain
QVQLVQSGAEVKKPGASVKVSCKASGYAFTNYLIEWVRQAPGQGLEWIGVINPGSGGTNYNEKFKGRATITADKSTSTAYMELSSLRSEDTAVYFCARTGVYGNFLIFDYWGQGTTVTVSS

SEQ ID NO: 1389 - protein, 118 aa, Artificial Sequence
  Heavy chain variable domain
QVQLKQSGPGLVQPSQSLSITCTVSGFSLTSYGVHWVRQSPGKGLEWLGVIWAGGTTDYNTPFTSRLSINKDNSKSQVFFKMNSLQSNDTAIYYCARFPSYRESMDYWGQGTLVTVSA

SEQ ID NO: 1390 - protein, 107 aa, Artificial Sequence
  Light chain variable domain
DIQMTQSPSSLSASVGDRVTITCGASENIYSNLNWYQQKPGKAPKLLIYAATNLADGVPSRFSGSGSGTDFTLTISSLQPEDFATYYCQHFWGTPYTFGQGTKVEIK

SEQ ID NO: 1391 - protein, 121 aa, Artificial Sequence
  Heavy chain variable domain
QVQLQQPGAELVKPGASVKMSCKASGYAFTNYLMHWVKQTPGRGLEWIGAINPGSGGTSYNQKFKGKATLTADKSSSTAYMQLSSLTSEDSAVYYCARRGDKYGSAWFAYWGAGTTVTVSA

SEQ ID NO: 1392 - protein, 107 aa, Artificial Sequence
  Light chain variable domain
DIQMTQSPSSLSASVGDRVTITCRASQDVSTAVAWYQQKPGKAPKLLIYSASFLYSGVPSRFSGSGSGTDFTLTISSLQPEDFATYYCQQHYSSPRTFGQGTKVEIK

SEQ ID NO: 1393 - protein, 107 aa, Artificial Sequence
  Light chain variable domain
DIVMTQSQRFMSTTVGDRVSITCKASQDVSTAVAWYQQKPGQSPKLLIYSASNRYTGVPDRFTGSGSGTDFTLTISNMQSEDLADFFCQQHYSSPRTFGGGTKLEIK

SEQ ID NO: 1394 - protein, 121 aa, Artificial Sequence
  Heavy chain variable domain
QVQLVQSGAEVKKPGASVKVSCKASGYAFTNYLIEWVRQAPGQGLEWIGVINPGSGGTNYNEKFKGRATITADKSTSTAYMELSSLRSEDTAVYFCARRGDKYGSAWFAYWGQGTTVTVSS

SEQ ID NO: 1395 - protein, 121 aa, Artificial Sequence
  Heavy chain variable domain
QVQLQQSGAEVKKPGASVKVSCKASGYAFTNYLIEWVRQAPGQGLEWIGVINPGSGGSKYNEKFKGRATITADKSTSTAYMELSSLRSEDTAVYFCARTGVYGNFLIFDYWGQGTTVTVSS

SEQ ID NO: 1396 - protein, 121 aa, Artificial Sequence
  Heavy chain variable domain
QVQLVQSGAEVKKPGASVKVSCKASGYAFTNYLIEWVKQAPGQGLEWIGVINPGSGGSKYNEKFKGRATITADKSTSTAYMELSSLRSEDTAVYFCARTGVYGNFLIFDYWGQGTTVTVSS

SEQ ID NO: 1397 - protein, 121 aa, Artificial Sequence
  Heavy chain variable domain
QVQLQQSGAEVKKPGASVKVSCKASGYAFTNYLIEWVKQAPGQGLEWIGVINPGSGGSKYNEKFKGRATITADKSTSTAYMELSSLRSEDTAVYFCARTGVYGNFLIFDYWGQGTTVTVSS

SEQ ID NO: 1398 - protein, 120 aa, Artificial Sequence
  Heavy chain variable domain
QVQLQQPGAELVKPGASVKMSCKATGYTFSNYWIEWVKQTPGRGLEWIGEILPGSGSSYYNQKFKGKATLTADKSSSTAYMQLSSLTSEDSAVYYCARQKYGNFYYFDFWGAGTTVTVSA

SEQ ID NO: 1399 - protein, 107 aa, Artificial Sequence
  Light chain variable domain
AIQMTQSPSSLSASVGDRVTITCRASQGIGNYLNWYQQKPGKAPKLLIYYTSSLHSGVPSRFSGSGSGTDYTFTISSLQPEDIATYYCHQYSKLPYTFGQGTKVEIK

SEQ ID NO: 1400 - protein, 120 aa, Artificial Sequence
  Heavy chain variable domain
QVQLVQSGAEVKKPGASVKVSCKASGYTFSNYWIEWVRQAPGQGLEWIGEILPGSGSSYYNENFKDRVTMTRDTSTSTVYMELSSLRSEDTAVYYCARQKYGNFYYFDFWGQGTLVTVSS

SEQ ID NO: 1401 - protein, 120 aa, Artificial Sequence
  Heavy chain variable domain
QVQLVQSGAEVKKPGASVKVSCKATGYTFSNYWIEWVRQAPGQGLEWIGEILPGSGSSYYNENFKDRVTMTRDTSTSTVYMELSSLRSEDTAVYYCARQKYGNFYYFDFWGQGTLVTVSS

SEQ ID NO: 1402 - protein, 120 aa, Artificial Sequence
  Heavy chain variable domain
EVKLVESGGGLVQPGGSLRLSCAASGFAFSSFDMSWVRQAPGKGLEWVSVISSGGSYTYYADSVKGRFTISRDNSKNTLYLQMNSLRAEDTAVYYCTRQDYRYPYIMDYWGQGTLVTVSS

SEQ ID NO: 1403 - protein, 107 aa, Artificial Sequence
  Light chain variable domain
DIQMTQSPSSLSASVGDRVTITCHASQNINVWLSWYQQKPGKAPKLLIYKASTLASGVPSRFSGSGSGTDFTLTISSLQPDDFATYYCQQGQSYPWTFGGGTKVEIK

SEQ ID NO: 1404 - protein, 120 aa, Artificial Sequence
  Heavy chain variable domain
EVKLVESGGGLVQPGGSLRLSCAASGFAFSSFDMSWVRQAPGKGLEWVAVISSGGSYTFYPDSVKGRFTISRDNSKNTLYLQMNSLRAEDTALYFCTRQDYRYPYIMDYWGQGTLVTVSS

SEQ ID NO: 1405 - protein, 121 aa, Artificial Sequence
  Heavy chain variable domain
QVQLQQSGAEVKKPGASVKVSCKASGYAFTNYLIEWVKQAPGQGLEWIGVINPGSGGNNYNEKFKGRATITADKSTSTAYMELSSLRSEDTAVYFCARRGDKYGSAWFAYWGQGTTVTVSA

SEQ ID NO: 1406 - protein, 107 aa, Artificial Sequence
  Light chain variable domain
DIVMTQSPSSLSASVGDRVTITCKASQDVSTAVAWYQQKPGKAPKLLIYSASYRYSGVPSRFSGSGSGTDFTLTISSLQPEDFATYYCQQHYSSPRTFGQGTKVEIK

SEQ ID NO: 1407 - protein, 107 aa, Artificial Sequence
  Light chain variable domain
DIVMTQSQRFMSTTVGDRVSITCKASQDVSTAVAWYQQKPGQSPKLLIYSASYRYTGVPDRFTGSGSGTDFTLTISNMQSEDLAVYYCQQHYSSPRTFGGGTKLEIK
